(19) United States
(12) Patent Application Publication
(10) Pub. No.: US 2009/0068641 A1
(43) Pub. Date: Mar. 12, 2009

(54) Highly conserved genes and their use to generate probes and primers for detection of microorganisms

(76) Inventors: Michel G. Bergeron, Quebec (CA); Maurice Boissinot, Quebec (CA); Ann Huletsky, Quebec (CA); Christian Menard, Quebec (CA); Marc Ouellette, Quebec (CA); Francois J. Picard, Quebec (CA); Paul H. Roy, Quebec (CA)

Correspondence Address: KNOBBE MARTENS OLSON & BEAR LLP, 2040 MAIN STREET, FOURTEENTH FLOOR, IRVINE, CA, 92614, US

(21) Appl. No.: 11/236,785

(22) Filed: Sep. 27, 2005

Related U.S. Application Data
(63) Continuation of application No. 10/089,177, filed on Mar. 27, 2002, now abandoned.

(30) Foreign Application Priority Data
Sep. 28, 1999 (CA) CA 2,283,458
May 19, 2000 (CA) CA 2,307,010

(51) Int. Cl. C12Q 1/68

(52) U.S. Cl. 435/6

(57) ABSTRACT

Four highly conserved genes, encoding translation elongation factor Tu, translation elongation factor G, the catalytic subunit of proton-translocating ATPase and the RecA recombinase, are used to generate species-specific, genus-specific, family-specific, group-specific and universal nucleic acid probes and amplification primers to rapidly detect and identify algal, archaeal, bacterial, fungal and parasitical pathogens from clinical specimens for diagnosis. The detection of associated antimicrobial agents resistance and toxin genes are also under the scope of the present invention.

### CROSS-REFERENCE TO RELATED APPLICATIONS

[0001] This application is a continuation of application Ser. No. 10/089,177, filed Mar. 27, 2002, which is the U.S. national phase under 35 U.S.C. §371 of prior PCT International Application No. PCT/CA00/01150, filed Sep. 28, 2000, which claims the benefit of Canada Application No. 2037010 filed May 19, 2000, and Canada Application No. 2283458, filed Sep. 28, 1999.

### SEQUENCE LISTING

[0002] The present application is being filed along with duplicate copies of a CD-ROM marked “Copy 1” and “Copy 2” containing a Sequence Listing in electronic format. The duplicate copies of the CD-ROM each contain a file entitled GENOM.048NPC.TXT created on Sep. 27, 2005 which is 1,931,863 bytes in size. The information on these duplicate CD-ROMs is incorporated herein by reference in its entirety.

### BACKGROUND OF THE INVENTION

### Classical Methods for the Identification of Microorganisms

[0003] Microorganisms are classically identified by their ability to utilize different substrates as a source of carbon and nitrogen through the use of biochemical tests such as the API20E™ system (bioMérieux). For susceptibility testing, clinical microbiology laboratories use methods including disk diffusion, agar dilution and broth microdilution. Although identifications based on biochemical tests and antibacterial susceptibility tests are cost-effective, generally two days are required to obtain preliminary results due to the necessity of two successive overnight incubations to identify the bacteria from clinical specimens as well as to determine their susceptibility to antimicrobial agents. There are some commercially available automated systems (i.e. the MicroScan™ system from Dade Behring and the Vitek™ system from bioMérieux) which use sophisticated and expensive apparatus for faster microbial identification and susceptibility testing (Stager and Davis, 1992, Clin. Microbiol. Rev. 5:302-327). These systems require shorter incubation periods, thereby allowing most bacterial identifications and susceptibility testing to be performed in less than 6 hours. Nevertheless, these faster systems always require the primary isolation of the bacteria or fingi as a pure culture, a process which takes at least 18 hours for a pure culture or 2 days for a mixed culture. So, the shortest time from sample reception to identification of the pathogen is around 24 hours. Moreover, fingi other than yeasts are often difficult or very slow to grow from clinical specimens. Identification must rely on labor-intensive techniques such as direct microscopic examination of the specimens and by direct and/or indirect immunological assays. Cultivation of most parasites is impractical in the clinical laboratory. Hence, microscopic examination of the specimen, a few immunological tests and clinical symptoms are often the only methods used for an identification that frequently remains presumptive.

[0004] The fastest bacterial identification system, the autoSCAN-Walk-Away™ system (Dade Behring) identifies both gram-negative and gram-positive bacterial species from standardized inoculum in as little as 2 hours and gives susceptibility patterns to most antibiotics in 5 to 6 hours. However, this system has a particularly high percentage (i.e. 3.3 to 40.5%) of non-conclusive identifications with bacterial species other than Enterobacteriaceae (Croizé J., 1995, Lett. Infectiol. 10:109-113; York et al., 1992, J. Clin. Microbiol. 30:2903-2910). For Enterobacteriaceae, the percentage of non-conclusive identifications was 2.7 to 11.4%. The list of microorganisms identified by commercial systems based on classical identification methods is given in Table 15.

[0005] A wide variety of bacteria and fungi are routinely isolated and identified from clinical specimens in microbiology laboratories. Tables 1 and 2 give the incidence for the most commonly isolated bacterial and fungal pathogens from various types of clinical specimens. These pathogens are the main organisms associated with nosocomial and community-acquired human infections and are therefore considered the most clinically important.

### Clinical Specimens Tested in Clinical Microbiology Laboratories

[0006] Most clinical specimens received in clinical microbiology laboratories are urine and blood samples. At the microbiology laboratory of the Centre Hospitalier de l'Université Laval (CHUL), urine and blood account for approximately 55% and 30% of the specimens received, respectively (Table 3). The remaining 15% of clinical specimens comprise various biological fluids including sputum, pus, cerebrospinal fluid, synovial fluid, and others (Table 3). Infections of the urinary tract, the respiratory tract and the bloodstream are usually of bacterial etiology and require antimicrobial therapy. In fact, all clinical samples received in the clinical microbiology laboratory are tested routinely for the identification of bacteria and antibiotic susceptibility.

Conventional Pathogen Identification from Clinical Specimens

### Urine Specimens

[0007] The search for pathogens in urine specimens is so preponderant in the routine microbiology laboratory that a myriad of tests have been developed. However, the gold standard remains the classical semi-quantitative plate culture method in which 1 μL of urine is streaked on agar plates and incubated for 18-24 hours. Colonies are then counted to determine the total number of colony forming units (CFU) per liter of urine. A bacterial urinary tract infection (UTI) is normally associated with a bacterial count of 10⁷ CFU/L or more in urine. However, infections with less than 10⁷ CFU/L in urine are possible, particularly in patients with a high incidence of diseases or those catheterized (Stark and Maki, 1984, N. Engl. J. Med. 311:560-564). Importantly, approximately 80% of urine specimens tested in clinical microbiology laboratories are considered negative (i.e. bacterial count of less than 10⁷ CFU/L; Table 3). Urine specimens found positive by culture are further characterized using standard biochemical tests to identify the bacterial pathogen and are also tested for susceptibility to antibiotics. The biochemical and susceptibility testing normally require 18-24 hours of incubation.

[0008] Accurate and rapid urine screening methods for bacterial pathogens would allow a faster identification of negative specimens and a more efficient treatment and care management of patients. Several rapid identification methods (Uriscreen™, UTIscreen™, Flash Track™ DNA probes and others) have been compared to slower standard biochemical methods, which are based on culture of the bacterial pathogens. Although much faster, these rapid tests showed low sensitivities and poor specificities as well as a high number of false negative and false positive results (Koening et al., 1992, J. Clin. Microbiol. 30:342-345; Pezzlo et al., 1992, J. Clin. Microbiol. 30:640-684).

### Blood Specimens

[0009] The Blood Specimens Received In The Microbiology Laboratory Are Always Submitted For Culture. Blood Culture Systems May Be Manual, Semi-Automated Or Completely Automated. The BACTEC™ System (From Becton Dickinson) And The Bactalert™ System (From Organon Teklika Corporation) Are The Two Most Widely Used Automated Blood Culture Systems. These Systems Incubate Blood Culture Bottles Under Optimal Conditions For Growth Of Most Bacteria. Bacterial Growth Is Monitored Continuously To Detect Early Positives By Using Highly Sensitive Bacterial Growth Detectors. Once Growth Is Detected, A Gram Stain Is Performed Directly From The Blood Culture And Then Used To Inoculate Nutrient Agar Plates. Subsequently, Bacterial Identification And Susceptibility Testing Are Carried Out From Isolated Bacterial Colonies With Automated Systems As Described Previously. Blood Culture Bottles Are Normally Reported As Negative If No Growth Is Detected After An Incubation Of 6 To 7 Days. Normally, The Vast Majority Of Blood Cultures Are Reported Negative. For Example, The Percentage Of Negative Blood Cultures At The Microbiology Laboratory Of The CHUL For The Period February 1994-January 1995 Was 93.1% (Table 3).

### Other Clinical Samples

[0010] Upon receipt by the clinical microbiology laboratory, all body fluids other than blood and urine that are from normally sterile sites (i.e. cerebrospinal, synovial, pleural, pericardial and others) are processed for direct microscopic examination and subsequent culture. Again, most clinical samples are negative for culture (Table 3). In all these normally sterile sites, tests for the universal detection of algae, archaea, bacteria, fungi and parasites would be very useful.

[0011] Regarding clinical specimens which are not from sterile sites such as sputum or stool specimens, the laboratory diagnosis by culture is more problematic because of the contamination by the normal flora. The bacterial or fungal pathogens potentially associated with the infection are grown and separated from the colonizing microbes using selective methods and then identified as described previously. Of course, the DNA-based universal detection of bacteria would not be useful for the diagnosis of bacterial infections at these non-sterile sites. On the other hand, DNA-based assays for species or genus or family or group detection and identification as well as for the detection of antimicrobial agents resistance genes from these specimens would be very useful and would offer several advantages over classical identification and susceptibility testing methods.

DNA-Based Assays with any Specimen

[0012] There is an obvious need for rapid and accurate diagnostic tests for the detection and identification of algae, archaea, bacteria, fingi and parasites directly from clinical specimens. DNA-based technologies are rapid and accurate and offer a great potential to improve the diagnosis of infectious diseases (Persing et al., 1993, Diagnostic Molecular Microbiology: Principles and Applications, American Society for Microbiology, Washington, D.C.; Bergeron and Ouellette, 1995, Infection 23:69-72; Bergeron and Ouellette, 1998, J Clin Microbiol. 36:2169-72). The DNA probes and amplification primers which are objects of the present invention are applicable for the detection and identification of algae, archaea, bacteria, fingi, and parasites directly from any clinical specimen such as blood, urine, sputum, cerebrospinal fluid, pus, genital and gastro-intestinal tracts, skin or any other type of specimens (Table 3). These assays are also applicable to detection from microbial cultures (e.g. blood cultures, bacterial or fungal colonies on nutrient agar, or liquid cell cultures in nutrient broth). The DNA-based tests proposed in this invention are superior in terms of both rapidity and accuracy to standard biochemical methods currently used for routine diagnosis from any clinical specimens in microbiology laboratories. Since these tests can be performed in one hour or less, they provide the clinician with new diagnostic tools which should contribute to a better management of patients with infectious diseases. Specimens from sources other than humans (e.g. other primates, birds, plants, mammals, farm animals, livestock, food products, environment such as water or soil, and others) may also be tested with these assays.

### A High Percentage of Culture-Negative Specimens

[0013] Among all the clinical specimens received for routine diagnosis, approximately 80% of urine specimens and even more (around 95%) for other types of normally sterile clinical specimens are negative for the presence of bacterial pathogens (Table 3). It would also be desirable, in addition to identify bacteria at the species or genus or family or group level in a given specimen, to screen out the high proportion of negative clinical specimens with a DNA-based test detecting the presence of any bacterium (i.e. universal bacterial detection). As disclosed in the present invention, such a screening test may be based on DNA amplification by PCR of a highly conserved genetic target found in all bacteria. Specimens negative for bacteria would not be amplified by this assay. On the other hand, those that are positive for any bacterium would give a positive amplification signal. Similarly, highly conserved genes of fungi and parasites could serve not only to identify particular species or genus or family or group but also to detect the presence of any fungi or parasite in the specimen.

### Towards the Development of Rapid DNA-Based Diagnostic Tests

[0014] A rapid diagnostic test should have a significant impact on the management of infections. DNA probe and DNA amplification technologies offer several advantages over conventional methods for the identification of pathogens and antimicrobial agents resistance genes from clinical samples (Persing et al., 1993, Diagnostic Molecular Microbiology: Principles and Applications, American Society for Microbiology, Washington, D.C.; Ehrlich and Greenberg, 1994, PCR-based Diagnostics in Infectious Disease, Blackwell Scientific Publications, Boston, Mass.). There is no need for culture of the pathogens, hence the organisms can be detected directly from clinical samples, thereby reducing the time associated with the isolation and identification of pathogens. Furthermore, DNA-based assays are more accurate for microbial identification than currently used phenotypic identification systems which are based on biochemical tests and/or microscopic examination. Commercially available DNA-based technologies are currently used in clinical microbiology laboratories, mainly for the detection and identification of fastidious bacterial pathogens such as Mycobacterium tuberculosis, Chlamydia trachomatis, Neisseria gonorrhoeae as well as for the detection of a variety of viruses (Tang Y. and Persing D. H., Molecular detection and identification of microorganisms, In: P. Murray et al., 1999, Manual of Clinical Microbiology, ASM press, 7^{th} edition, Washington D.C.). There are also other commercially available DNA-based assays which are used for culture confirmation assays.

[0015] Others have developed DNA-based tests for the detection and identification of bacterial pathogens which are objects of the present invention, for example: Staphylococcus sp. (U.S. Pat. No. 5,437,978), Neisseria sp. (U.S. Pat. No. 5,162,199 and European patent serial no. 0,337,896,131) and Listeria monocytogenes (U.S. Pat. Nos. 5,389,513 and 5,089,386). However, the diagnostic tests described in these patents are based either on rRNA genes or on genetic targets different from those described in the present invention. To our knowledge there are only four patents published by others mentioning the use of any of the four highly conserved gene targets described in the present invention for diagnostic purposes (PCT international publication number WO92/03455 and WO00/14274, European patent publication number 0 133 671 B1, and European patent publication number 0 133 288 A2). WO92/03455 is focused on the inhibition of Candida species for therapeutic purposes. It describes antisense oligonucleotide probes hybridizing to Candida messenger RNA. Two of the numerous mRNA proposed as targets are coding for translation elongation factor 1 (tef1) and the beta subunit of ATPase. DNA amplification or hybrization are not under the scope of their invention and although diagnostic use is briefly mentioned in the body of the application, no specific claim is made regarding diagnostics. WO00/14274 describes the use of bacterial recA gene for identification and speciation of bacteria of the Burkholderia cepacia complex. Specific claims are made on a method for obtaining nucleotide sequence information for the recA gene from the target bacteria and a following comparison with a standard library of nucleotide sequence information (claim 1), and on the use of PCR for amplification of the recA gene in a sample of interest (claims 4 to 7, and 13). However, the use of a discriminatory restriction enzyme in a RFLP procedure is essential to fulfill the speciation and WO00/14274 did not mention that multiple recA probes could be used simultaneously. Patent EP 0 133 288 A2 describes and claims the use of bacterial tuf (and fus) sequence for diagnostics based on hybridization of a tuf (or fus) probe with bacterial DNA. DNA amplification is not under the scope of EP 0 133 288 A2. Nowhere it is mentioned that multiple tuf (or fus) probes could be used simultaneously. No mention is made regarding speciation using tuf (or fus) DNA nucleic acids and/or sequences. The sensitivities of the tuf hybrizations reported are 1×10⁶ bacteria or 1-100 ng of DNA. This is much less sensitive than what is achieved by our assays using nucleic acid amplification technologies.

[0016] Although there are phenotypic identification methods which have been used for more than 125 years in clinical microbiology laboratories, these methods do not provide information fast enough to be useful in the initial management of patients. There is a need to increase the speed of the diagnosis of commonly encountered bacterial, fungal and parasitical infections. Besides being much faster, DNA-based diagnostic tests are more accurate than standard biochemical tests presently used for diagnosis because the microbial genotype (e.g. DNA level) is more stable than the phenotype (e.g. physiologic level).

[0017] Bacteria, fungi and parasites encompass numerous well-known microbial pathogens. Other microorganisms could also be pathogens or associated with human diseases. For example, achlorophylious algae of the Prototheca genus can infect humans. Archae, especially methanogens, are present in the gut flora of humans (Reeve, J. H., 1999, J. Bacteriol. 181:3613-3617). However, methanogens have been associated to pathologic manifestations in the colon, vagina, and mouth (Belay et al., 1988, Appl. Enviro. Microbiol. 54:600-603; Belay et al., 1990, J. Clin. Microbiol. 28:1666-1668; Weaver et al., 1986, Gut 27:698-704).

[0018] In addition to the identification of the infectious agent, it is often desirable to identify harmful toxins and/or to monitor the sensitivity of the microorganism to antimicrobial agents. As revealed in this invention, genetic identification of the microorganism could be performed simultaneously with toxin and antimicrobial agents resistance genes.

[0019] Knowledge of the genomic sequences of algal, archaeal, bacterial, fungal and parasitical species continuously increases as testified by the number of sequences available from public databases such as GenBank. From the sequences readily available from those public databases, there is no indication therefrom as to their potential for diagnostic purposes. For determining good candidates for diagnostic purposes, one could select sequences for DNA-based assays for (i) the species-specific detection and identification of commonly encountered bacterial, fungal and parasitical pathogens, (ii) the genus-specific detection and identification of commonly encountered bacterial, fungal or parasitical pathogens, (iii) the family-specific detection and identification of commonly encountered bacterial, fungal or parasitical pathogens, (iv) the group-specific detection and identification of commonly encountered bacterial, fungal or parasitical pathogens, (v) the universal detection of algal, archaeal, bacterial, fungal or parasitical pathogens, and/or (vi) the specific detection and identification of antimicrobial agents resistance genes, and/or (vii) the specific detection and identification of bacterial toxin genes. All of the above types of DNA-based assays may be performed directly from any type of clinical specimens or from a microbial culture.

[0020] In our assigned U.S. Pat. No. 6,001,564 and our WO98/20157 patent publication, we described DNA sequences suitable for (i) the species-specific detection and identification of clinically important bacterial pathogens, (ii) the universal detection of bacteria, and (iii) the detection of antimicrobial agents resistance genes.

[0021] The WO98/20157 patent publication describes proprietary tuf DNA sequences as well as tuf sequences selected from public databases (in both cases, fragments of at least 100 base pairs), as well as oligonucleotide probes and amplification primers derived from these sequences. All the nucleic acid sequences described in that patent publication can enter in the composition of diagnostic kits or products and methods capable of a) detecting the presence of bacteria and fingi b) detecting specifically at the species, genus, family or group levels, the presence of bacteria and fungi and antimicrobial agents resistance genes associated with these pathogens. However, these methods and kits need to be improved, since the ideal kit and method should be capable of diagnosing close to 100% of microbial pathogens and associated antimicrobial agents resistance genes and toxins genes. For example, infections caused by Enterococcus faecium have become a clinical problem because of its resistance to many antibiotics. Both the detection of these bacteria and the evaluation of their resistance profiles are desirable. Besides that, novel DNA sequences (probes and primers) capable of recognizing the same and other microbial pathogens or the same and additional antimicrobial agents resistance genes are also desirable to aim at detecting more target genes and complement our earlier patent applications.

[0022] The present invention improves the assigned application by disclosing new proprietary tuf nucleic acids and/or sequences as well as describing new ways to obtain tuf nucleic acids and/or sequences. In addition we disclose new proprietary atpD and recA nucleic acids and/or sequences. In addition, new uses of tuf, atpD and recA DNA nucleic acids and/or sequences selected from public databases (Table 11) are disclosed.

### Highly Conserved Genes for Identification and Diagnostics

[0023] Highly conserved genes are useful for identification of microorganisms. For bacteria, the most studied genes for identification of microorganisms are the universally conserved ribosomal RNA genes (rRNA). Among those, the principal targets used for identification purposes are the small subunit (SSU) ribosomal 16S rRNA genes (in prokaryotes) and 18S rRNA genes (in eukaryotes) (Relman and Persing, Genotyping Methods for Microbial Identification, In: D. H. Persing, 1996, PCR Protocols for Emerging Infectious Diseases, ASM Press, Washington D.C.). The rRNA genes are also the most commonly used targets for universal detection of bacteria (Chen et al., 1988, FEMS Microbiol. Lett. 57:19-24; McCabe et al., 1999, Mol. Genet. Metabol. 66:205-211) and fungi (Van Burik et al., 1998, J. Clin. Microbiol. 36:1169-1175).

[0024] However, it may be difficult to discriminate between closely related species when using primers derived from the 16S rRNA. In some instances, 16S rRNA sequence identity may not be sufficient to guarantee species identity (Fox et al., 1992, Int. J. Syst. Bacteriol. 42:166-170) and it has been shown that inter-operon sequence variation as well as strain to strain variation could undermine the application of 16S rRNA for identification purposes (Clayton et al., 1995, Int. J. Syst. Bacteriol. 45:595-599). The heat shock proteins (HSP) are another family of very conserved proteins. These ubiquitous proteins in bacteria and eukaryotes are expressed in answer to external stress agents. One of the most described of these HSP is HSP 60. This protein is very conserved at the amino acid level, hence it has been useful for phylogenetic studies. Similar to 16S rRNA, it would be difficult to discriminate between species using the HSP 60 nucleotide sequences as a diagnostic tool. However, Goh et al. identified a highly conserved region flanking a variable region in HSP 60, which led to the design of universal primers amplifying this variable region (Goh et al., U.S. Pat. No. 5,708,160). The sequence variations in the resulting amplicons were found useful for the design of species-specific assays.

### SUMMARY OF THE INVENTION

[0025] It is an object of the present invention to provide a specific, ubiquitous and sensitive method using probes and/or amplification primers for determining the presence and/or amount of nucleic acids:
[0026] from any algal, archaeal, bacterial, fungal or parasitical species in any sample suspected of containing said nucleic acids, and optionally,
[0027] from specific microbial species or genera selected from the group consisting of the species or genera listed in Table 4, and optionally,
[0028] from an antimicrobial agents resistance gene selected from the group consisting of the genes listed in Table 5, and optionally,
[0029] from a toxin gene selected from the group consisting of the genes listed in Table 6,
   [0030] wherein each of said nucleic acids or a variant or part thereof comprises a selected target region hybridizable with said probes or primers;
   [0031] said method comprising the steps of contacting said sample with said probes or primers and detecting the presence and/or amount of hybridized probes or amplified products as an indication of the presence and/or amount of said any microbial species, specific microbial species or genus or family or group and antimicrobial agents resistance gene and/or toxin gene.

[0032] In a specific embodiment, a similar method directed to each specific microbial species or genus or family or group detection and identification, antimicrobial agents resistance genes detection, toxin genes detection, and universal bacterial detection, separately, is provided.

[0033] In a more specific embodiment, the method makes use of DNA fragments from conserved genes (proprietary sequences and sequences obtained from public databases), selected for their capacity to sensitively, specifically and ubiquitously detect the targeted algal, archaeal, bacterial, fungal or parasitical nucleic acids.

[0034] In a particularly preferred embodiment, oligonucleotides of at least 12 nucleotides in length have been derived from the longer DNA fragments, and are used in the present method as probes or amplification primers. To be a good diagnostic candidate, an oligonucleotide of at least 12 nucleotides should be capable of hybridizing with nucleic acids from given microorganism(s), and with substantially all strains and representatives of said microorganism(s); said oligonucleotide being species-, or genus-, or family-, or group-specific or universal.

[0035] In another particularly preferred embodiment, oligonucleotides primers and probes of at least 12 nucleotides in length are designed for their specificity and ubiquity based upon analysis of our databases of tuf, atpD and recA sequences. These databases are generated using both proprietary and public sequence information. Altogether, these databases form a sequence repertory useful for the design of primers and probes for the detection and identification of algal, archaeal, bacterial, fungal and parasitical microorganisms. The repertory can also be subdivided into subrepertories for sequence analysis leading to the design of various primers and probes.

[0036] The tuf, atpD and recA sequences databases as a product to assist the design of oligonucleotides primers and probes for the detection and identification of algal, archaeal, bacterial, fungal and parasitical microorganisms are also covered.

[0037] The proprietary oligonucleotides (probes and primers) are also another object of this invention.

[0038] Diagnostic kits comprising probes or amplification primers such as those for the detection of a microbial species or genus or family or phylum or group selected from the following list consisting of Abiotrophia adiacens, Acinetobacter baumanii, Actinomycetae, Bacteroides, Cytophaga and Flexibacter phylum, Bacteroides fragilis, Bordetella pertussis, Bordetella sp., Campylobacter jejuni and C. coli, Candida albicans, Candida dubliniensis, Candida glabrata, Candida guillierinondii, Candida krusei, Candida lusitaniae, Candida parapsilosis, Candida tropicalis, Candida zeylanoides, Candida sp., Chlamydia pneumoniae, Chlamydia trachomatis, Clostridium sp., Corynebacterium sp., Crypococcus neoformans, Cryptococcus sp., Cryptosporidium parvum, Entamoeba sp., Enterobacteriaceae group, Enterococcus casseliflavus-flavescens-gallinarum group, Enterococcus faecalis, Enterococcus faecium, Enterococcus gallinarum, Enterococcus sp., Escherichia coli and Shigella sp. group, Gemella sp., Giardia sp., Haemophilus influenzae, Klebsiella pneumoniae, Legionella pneumophila, Legionella sp., Leishmania sp., Mycobacteriaceae family, Mycoplasma pneumoniae, Neisseria gonorrhoeae, platelets contaminants group (see Table 14), Pseudomonas aeruginosa, Pseudomonads group, Staphylococcus aureus, Staphylococcus epidermidis, Staphylococcus haemolyticus, Staphylococcus hominis, Staphylococcus saprophyticus, Staphylococcus sp., Streptococcus agalactiae, Streptococcus pneumoniae, Streptococcus pyogenes, Streptococcus sp., Trypanosoma brucei, Trypanosoma cruzi, Trypanosoma sp., Trypanosomatidae family, are also objects of the present invention.

[0039] Diagnostic kits further comprising probes or amplification primers for the detection of an antimicrobial agents resistance gene selected from the group listed in Table 5 are also objects of this invention.

[0040] Diagnostic kits further comprising probes or amplification primers for the detection of a toxin gene selected from the group listed in Table 6 are also objects of this invention.

[0041] Diagnostic kits further comprising probes or amplification primers for the detection of any other algal, archaeal, bacterial, fungal or parasitical species than those specifically listed herein, comprising or not comprising those for the detection of the specific microbial species or genus or family or group listed above, and further comprising or not comprising probes and primers for the antimicrobial agents resistance genes listed in Table 5, and further comprising or not comprising probes and primers for the toxin genes listed in Table 6 are also objects of this invention.

[0042] In a preferred embodiment, such a kit allows for the separate or the simultaneous detection and identification of the above-listed microbial species or genus or family or group; or universal detection of algae, archaea, bacteria, fungi or parasites; or antimicrobial agents resistance genes; or toxin genes; or for the detection of any microorganism (algae, archaea, bacteria, fungi or parasites).

[0043] In the above methods and kits, probes and primers are not limited to nucleic acids and may include, but are not restricted to analogs of nucleotides such as: inosine, 3-nitropyrrole nucleosides (Nichols et al., 1994, Nature 369:492-493), Linked Nucleic Acids (LNA) (Koskin et al., 1998, Tetrahedron 54:3607-3630), and Peptide Nucleic Acids (PNA) (Egholm et al., 1993, Nature 365:566-568).

[0044] In the above methods and kits, amplification reactions may include but are not restricted to: a) polymerase chain reaction (PCR), b) ligase chain reaction (LCR), c) nucleic acid sequence-based amplification (NASBA), d) self-sustained sequence replication (3SR), e) strand displacement amplification (SDA), f) branched DNA signal amplification (bDNA), g) transcription-mediated amplification (TMA), h) cycling probe technology (CPT), i) nested PCR, j) multiplex PCR, k) solid phase amplification (SPA), l) nuclease dependent signal amplification (NDSA), m) rolling circle amplification technology (RCA), n) Anchored strand displacement amplification, o) Solid-phase (immobilized) rolling circle amplification.

[0045] In the above methods and kits, detection of the nucleic acids of target genes may include real-time or post-amplification technologies. These detection technologies can include, but are not limited to, fluorescence resonance energy transfer (FRET)-based methods such as adjacent hybridization to FRET probes (including probe-probe and probe-primer methods), TaqMan, Molecular Beacons, scorpions, nanoparticle probes and Sunrise (Amplifluor). Other detection methods include target genes nucleic acids detection via immunological methods, solid phase hybridization methods on filters, chips or any other solid support, whether the hybridization is monitored by fluorescence, chemiluminescence, potentiometry, mass spectrometry, plasmon resonance, polarimetry, colorimetry, or scanometry. Sequencing, including sequencing by dideoxy termination or sequencing by hybridization, e.g. sequencing using a DNA chip, is another possible method to detect and identify the nucleic acids of target genes.

[0046] In a preferred embodiment, a PCR protocol is used for nucleic acid amplification, in diagnostic method as well as in method of construction of a repertory of nucleic acids and deduced sequences.

[0047] In a particularly preferred embodiment, a PCR protocol is provided, comprising, an initial denaturation step of 1-3 minutes at 95° C., followed by an amplification cycle including a denaturation step of one second at 95° C. and an annealing step of 30 seconds at 45-65° C., without any time allowed specifically for the elongation step. This PCR protocol has been standardized to be suitable for PCR reactions with most selected primer pairs, which greatly facilitates the testing because each clinical sample can be tested with universal, species-specific, genus-specific, antimicrobial agents resistance gene and toxin gene PCR primers under uniform cycling conditions. Furthermore, various combinations of primer pairs may be used in multiplex PCR assays.

[0048] It is also an object of the present invention that tuf, atpD and recA sequences could serve as drug targets and these sequences and means to obtain them revealed in the present invention can assist the screening, design and modeling of these drugs.

[0049] It is also an object of the present invention that tuf, atpD and recA sequences could serve for vaccine purposes and these sequences and means to obtain them revealed in the present invention can assist the screening, design and modeling of these vaccines.

[0050] We aim at developing a universal DNA-based test or kit to screen out rapidly samples which are free of algal, archaeal, bacterial, fungal or parasitical cells. This test could be used alone or combined with more specific identification tests to detect and identify the above algal and/or archaeal and/or bacterial and/or fungal and/or parasitical species and/or genera and/or family and/or group and to determine rapidly the bacterial resistance to antibiotics and/or presence of bacterial toxins. Although the sequences from the selected antimicrobial agents resistance genes are available from public databases and have been used to develop DNA-based tests for their detection, our approach is unique because it represents a major improvement over current diagnostic methods based on bacterial cultures. Using an amplification method for the simultaneous or independent or sequential microbial detection-identification and antimicrobial resistance genes detection, there is no need for culturing the clinical sample prior to testing. Moreover, a modified PCR protocol has been developed to detect all target DNA sequences in approximately one hour under uniform amplification conditions. This procedure should save lives by optimizing treatment, should diminish antimicrobial agents resistance because less antibiotics will be prescribed, should reduce the use of broad spectrum antibiotics which are expensive, decrease overall health care costs by preventing or shortening hospitalizations, and side effects of drugs, and decrease the time and costs associated with clinical laboratory testing.

[0051] In another embodiment, sequence repertories and ways to obtain them for other gene targets are also an object of this invention, such is the case for the hexA nucleic acids and/or sequences of Streptococci.

[0052] In yet another embodiment, for the detection of mutations associated with antibiotic resistance genes, we built repertories to distinguish between point mutations reflecting only gene diversity and point mutations involved in resistance. Such repertories and ways to obtain them for pbp1a, pbp2b and pbp2x genes of sensitive and penicillin-resistant Streptoccoccus pneumoniae and also for gyrA and parC gene fragments from various bacterial species are also an object of the present invention.

[0053] The diagnostic kits, primers and probes mentioned above can be used to identify algae, archaea, bacteria, fingi, parasites, antimicrobial agents resistance genes and toxin genes on any type of sample, whether said diagnostic kits, primers and probes are used for in vitro or in situ applications. The said samples may include but are not limited to: any clinical sample, any environment sample, any microbial culture, any microbial colony, any tissue, and any cell line.

[0054] It is also an object of the present invention that said diagnostic kits, primers and probes can be used alone or in conjunction with any other assay suitable to identify microorganisms, including but not limited to: any immunoassay, any enzymatic assay, any biochemical assay, any lysotypic assay, any serological assay, any differential culture medium, any enrichment culture medium, any selective culture medium, any specific assay medium, any identification culture medium, any enumeration culture medium, any cellular stain, any culture on specific cell lines, and any infectivity assay on animals.

[0055] In the methods and kits described herein below, the oligonucleotide probes and amplification primers have been derived from larger sequences (i.e. DNA fragments of at least 100 base pairs). All DNA fragments have been obtained either from proprietary fragments or from public databases. DNA fragments selected from public databases are newly used in a method of detection according to the present invention, since they have been selected for their diagnostic potential.

[0056] In another embodiment, the amino acid sequences translated from the repertory of tuf, atpD and recA nucleic acids and/or sequences are also an object of the present invention.

[0057] It is clear to the individual skilled in the art that other oligonucleotide sequences appropriate for (i) the universal detection of algae, archaea, bacteria, fingi or parasites, (ii) the detection and identification of the above microbial species or genus or family or group, and (iii) the detection of antimicrobial agents resistance genes, and (iv) the detection of toxin genes, other than those listed in Annexes I to III, XXI to XXII, XXXII to XXXVII, XXXIX to XLI, and XLIII to LIV may also be derived from the proprietary fragments or selected public database sequences. For example, the oligonucleotide primers or probes may be shorter or longer than the ones chosen; they may also be selected anywhere else in the proprietary DNA fragments or in the sequences selected from public databases; they may be also variants of the same oligonucleotide. If the target DNA or a variant thereof hybridizes to a given oligonucleotide, or if the target DNA or a variant thereof can be amplified by a given oligonucleotide PCR primer pair, the converse is also true; a given target DNA may hybridize to a variant oligonucleotide probe or be amplified by a variant oligonucleotide PCR primer. Alternatively, the oligonucleotides may be designed from any DNA fragment sequences for use in amplification methods other than PCR. Consequently, the core of this invention is the identification of universal, species-specific, genus-specific, family-specific, group-specific, resistance gene-specific, toxin gene-specific genomic or non-genomic DNA fragments which are used as a source of specific and ubiquitous oligonucleotide probes and/or amplification primers. Although the selection and evaluation of oligonucleotides suitable for diagnostic purposes requires much effort, it is quite possible for the individual skilled in the art to derive, from the selected DNA fragments, oligonucleotides other than the ones listed in Annexes I to III, XXI to XXII, XXXII to XXXVII, XXXIX to XLI, and XLIII to LIV which are suitable for diagnostic purposes. When a proprietary fragment or a public databases sequence is selected for its specificity and ubiquity, it increases the probability that subsets thereof will also be specific and ubiquitous.

[0058] Since a high percentage of clinical specimens are negative for bacteria (Table 3), DNA fragments having a high potential for the selection of universal oligonucleotide probes or primers were selected from proprietary and public database sequences. The amplification primers were selected from genes highly conserved in algae, archaea, bacteria, fungi and parasites, and are used to detect the presence of any algal, archaeal, bacterial, fungal or parasitical pathogen in clinical specimens in order to determine rapidly whether it is positive or negative for algae, archaea, bacteria, fungi or parasites. The selected genes, designated tuf, fus, atpD and recA, encode respectively 2 proteins (elongation factors Tu and G) involved in the translational process during protein synthesis, a protein (beta subunit) responsible for the catalytic activity of proton pump ATPase and a protein responsible for the homologous recombination of genetic material. The alignments of tuf, atpD and recA sequences used to derive the universal primers include both proprietary and public database sequences. The universal primer strategy allows the rapid screening of the numerous negative clinical specimens (around 80% of the specimens received, see Table 3) submitted for microbiological testing.

[0059] Table 4 provides a list of the archaeal, bacterial, fungal and parasitical species for which tuf and/or atpD and/or recA nucleic acids and/or sequences are revealed in the present invention. Tables 5 and 6 provide a list of antimicrobial agents resistance genes and toxin genes selected for diagnostic purposes. Table 7 provides the origin of tuf atpD and recA nucleic acids and/or sequences listed in the sequence listing. Tables 8-10 and 12-14 provide lists of species used to test the specificity, ubiquity and sensitivity of some assays described in the examples. Table 11 provides a list of microbial species for which tuf and/or atpD and/or recA sequences are available in public databases. Table 15 lists the microorganisms identified by commercial systems. Tables 16-18 are part of Example 42, whereas Tables 19-20 are part of Example 43. Tables 21-22 illustrate Example 44, whereas Tables 23-25 illustrate Example 45.

### BRIEF DESCRIPTION OF THE DRAWINGS

[0060] FIGS. 1 and 2 illustrate the principal subdivisions of the tuf and atpD sequences repertories, respectively. For the design of primers and probes, depending on the needs, one may want to use the complete data set illustrated on the top of the pyramid or use only a subset illustrated by the different branching points. Smaller subdivisions, representing groups, families, genus and species, could even be made to extend to the bottom of the pyramid. Because the tuf and atpD sequences are highly conserved and evolved with each species, the design of primers and probes does not need to include all the sequences within the database or its subdivisions. As illustrated in Annexes IV to XX, XXIII to XXXI, XXXVIII and XLII, depending on the use, sequences from a limited number of species can be carefully selected to represent: i) only the main phylogenetic branches from which the intended probes and primers need to be differentiating, and ii) only the species for which they need to be matching. However, for ubiquity purposes, and especially for primers and probes identifying large groups of species (genus, family, group or universal, or sequencing primers), the more data is included into the sequence analysis, the better the probes and primers will be suitable for each particular intended use. Similarly, for specificity purposes, a larger data set (or repertory) ensures optimal primers and probes design by reducing the chance of employing nonspecific oligonucleotides.

[0061] FIG. 3 illustrates the approach used to design specific amplification primers from fusA as well as from the region between the end of fusA and the beginning of tuf in the streptomycin (str) operon (referred to as the fusA-tuf intergenic spacer in Table 7). Shown is a schematic organization of universal amplification primers (SEQ ID NOs. 1221-1229) in the str operon. Amplicon sizes are given in bases pairs. Drawing not to scale, as the fusA-tuf intergenic spacer size varies depending on the bacterial species. Indicated amplicon lengths are for E. coli.

[0062] FIGS. 4 to 6 are illustrations to Example 42, whereas FIGS. 7 to 10 illustrate Example 43. FIGS. 11 and 12 illustrate Example 44.

[0063] FIG. 4. Abridged multiple amino acid sequence alignment of the partial tuf gene products from selected species illustrated using the program Alscript. Residues highly conserved in bacteria are boxed in grey and gaps are represented with dots. Residues in reverse print are unique to the enterococcal tufB as well as to streptococcal and lactococcal tuf gene products. Numbering is based on E. coli EF-Tu and secondary structure elements of E. coli EF-Tu are represented by cylinders (α-helices) and arrows (β-strands).

[0064] FIG. 5. Distance matrix tree of bacterial EF-Tu based on amino acid sequence homology. The tree was constructed by the neighbor-joining method. The tree was rooted using archeal and eukaryotic EF-1α genes as the outgroup. The scale bar represents 5% changes in amino acid sequence, as determined by taking the sum of all of the horizontal lines connecting two species.

[0065] FIG. 6. Southern hybridization of BglII/XbaI digested genomic DNAs of some enterococci (except for E. casseliflavus and E. gallinarum whose genomic DNA was digested with BamHI/PvuII) using the tufA gene fragment of E. faecium as probes. The sizes of hybridizing fragments are shown in kilobases. Strains tested are listed in Table 16.

[0066] FIG. 7. Pantoea and Tatumella species specific signature indel in atpD genes. The nucleotide positions given are for E. coli atpD sequence (GenBank accession no. V00267). Numbering starts from the first base of the initiation codon.

[0067] FIG. 8: Trees based on sequence data from tuf (left side) and atpD (right side). The phylogenetic analysis was performed using the Neighbor-Joining method calculated using the Kimura two-parameter method. The value on each branch indicates the occurrence (%) of the branching order in 750 bootstrapped trees.

[0068] FIG. 9: Phylogenetic tree of members of the family Enterobacteriaceae based on tuf (a), atpD (b), and 16S rDNA (c) genes. Trees were generated by neighbor-joining method calculated using the Kimura two-parameter method. The value on each branch is the percentage of bootstrap replications supporting the branch. 750 bootstrap replications were calculated.

[0069] FIG. 10: Plot of tuf distances versus 16S rDNA distances (a), atpD distances versus 16S rDNA distances (b), and atpD distances versus tuf distances (c). Symbols: ◯, distances between pairs of strains belonging to the same species; , distances between E. coli strains and Shigella strains; □, distances between pairs belonging to the same genus; ▪, distances between pairs belonging to different genera; Δ, distances between pairs belonging to different families.

### DETAILED DESCRIPTION OF THE PREFERRED EMBODIMENT

[0070] The present inventors reasoned that comparing the published Haemophilus influenzae and Mycoplasma genitalium genomes and searching for conserved genes could provide targets to develop useful diagnostic primers and probes. This sequence comparison is highly informative as these two bacteria are distantly related and most genes present in the minimal genome of M. genitalium are likely to be present in every bacterium. Therefore genes conserved between these two bacteria are likely to be conserved in all other bacteria.

[0071] Following the genomic comparison, it was found that several protein-coding genes were conserved in evolution. Highly conserved proteins included the translation elongation factors G (EF-G) and Tu (EF-Tu) and the β subunit of F₀F₁ type ATP-synthase, and to a lesser extent, the RecA recombinase. These four proteins coding genes were selected amongst the 20 most conserved genes on the basis that they all possess at least two highly conserved regions suitable for the design of universal amplification and sequencing primers. Moreover, within the fragment amplified by these primers, highly conserved and more variable regions are also present hence suggesting it might be possible to rapidly obtain sequence information from various microbial species to design universal as well as species-, genus-, family-, or group-specific primers and probes of potential use for the detection and identification and/or quantification of microorganisms.

[0072] Translation elongation factors are members of a family of GTP-binding proteins which intervene in the interactions of tRNA molecules with the ribosome machinery during essential steps of protein synthesis. The role of elongation factor Tu is to facilitate the binding of aminoacylated tRNA molecules to the A site of the ribosome. The eukaryotic, archaeal (archaebacterial) and algal homolog of EF-Tu is called elongation factor 1 alpha (EF-1α). All protein synthesis factors originated from a common ancestor via gene duplications and fusions (Cousineau et al., 1997, J. Mol. Evol. 45:661-670). In particular, elongation factor G (EF-G), although having a functional role in promoting the translocation of aminoacyl-tRNA molecules from the A site to the P site of the ribosome, shares sequence homologies with EF-Tu and is thought to have arisen from the duplication and fusion of an ancestor of the EF-Tu gene.

[0073] In addition, EF-Tu is known to be the target for antibiotics belonging to the elfamycin's group as well as to other structural classes (Anborgh and Parmeggiani, 1991, EMBO J. 10:779-784; Luiten et al., 1992, European patent application serial No. EP 0 466 251 A1). EF-G for its part, is the target of the antibiotic fusidic acid. In addition to its crucial activities in translation, EF-Tu has chaperone-like functions in protein folding, protection against heat denaturation of proteins and interactions with unfolded proteins (Caldas et al., 1998, J. Biol. Chem. 273:11478-11482). Interestingly, a form of the EF-Tu protein has been identified as a dominant component of the periplasm of Neisseria gonorrhoeae (Porcella et al., 1996, Microbiology 142:2481-2489), hence suggesting that at least in some bacterial species, EF-Tu might be an antigen with vaccine potential.

[0074] F₀F₁ type ATP-synthase belongs to a superfamily of proton-translocating ATPases divided in three major families: P, V and F (Nelson and Taiz, 1989, TIBS 14:113-116). P-ATPases (or E₁-E₂ type) operate via a phosphorylated intermediate and are not evolutionarily related to the other two families. V-ATPases (or V₀V₁ type) are present on the vacuolar and other endomembranes of eukaryotes, on the plasma membrane of archaea (archaebacteria) and algae, and also on the plasma membrane of some eubacteria especially species belonging to the order Spirochaetales as well as to the Chlamydiaceae and Deinococcaceae families. F-ATPases (or F₀F₁ type) are found on the plasma membrane of most eubacteria, on the inner membrane of mitochondria and on the thylakoid membrane of chloroplasts. They function mainly in ATP synthesis. They are large multimeric enzymes sharing numerous structural and functional features with the V-ATPases. F and V-type ATPases have diverged from a common ancestor in an event preceding the appearance of eukaryotes. The β subunit of the F-ATPases is the catalytic subunit and it possesses low but significant sequence homologies with the catalytic A subunit of V-ATPases.

[0075] The translation elongation factors EF-Tu, EF-G and EF-1a and the catalytic subunit of F or V-types ATP-synthase, are highly conserved proteins sometimes used for phylogenetic analysis and their genes are also known to be highly conserved (Iwabe et al., 1989, Proc. Natl. Acad. Sci. USA 86:9355-9359, Gogarten et al., 1989, Proc. Natl. Acad. Sci. USA 86:6661-6665, Ludwig et al., 1993, Antonie van Leeuwenhoek 64:285-305). A recent BLAST (Altschul et al., 1997, J. Mol. Biol. 215:403-410) search performed by the present inventors on the GenBank, European Molecular Biology Laboratory (EMBL), DNA Database of Japan (DDBJ) and specific genome project databases indicated that throughout bacteria, the EF-Tu and the β subunit of F₀F₁ type ATP-synthase genes may be more conserved than other genes that are well conserved between H. influenzae and M. genitalium.

[0076] The RecA recombinase is a multifunctional protein encoded by the recA gene. It plays a central role in homologous recombination, it is critical for the repair of DNA damage and it is involved in the regulation of the SOS system by promoting the proteolytic digestion of the LexA repressor. It is highly conserved in bacteria and could serve as a useful genetic marker to reconstruct bacterial phylogeny (Miller and Kokjohn, 1990, Annu. Rev. Microbiol. 44:365-394). Although RecA possesses some highly conserved sequence segments that we used to design universal primers aimed at sequencing the recA fragments, it is clearly not as well conserved EF-G, EF-Tu and β subunit of F₀F₁ type ATP-synthase. Hence, RecA may not be optimal for universal detection of bacteria with high sensitivity but it was chosen because preliminary data indicated that EF-G, EF-Tu and β subunit of F₀F₁ type ATP-synthase may sometimes be too closely related to find specific primer pairs that could discriminate between certain very closely related species and genera. While RecA, EF-G, EF-Tu and β subunit of F₀F₁ type ATP-synthase genes, possesses highly conserved regions suitable for the design of universal sequencing primers, the less conserved region between primers should be divergent enough to allow species-specific and genus-specific primers in those cases.

[0077] Thus, as targets to design primers and probes for the genetic detection of microorganisms, the present inventors have focused on the genes encoding these four proteins: tuf, the gene for elongation factor Tu (EF-Tu); fus, the gene for the elongation factor G (EF-G); atpD, the gene for β subunit of F₀F₁ type ATP-synthase; and recA, the gene encoding the RecA recombinase. In several bacterial genomes tuf is often found in two highly similar duplicated copies named tufA and tufB (Filer and Furano, 1981, J. Bacteriol. 148:1006-1011, Sela et al., 1989, J. Bacteriol. 171:581-584). In some particular cases, more divergent copies of the tuf genes can exist in some bacterial species such as some actinomycetes (Luiten et al. European patent application publication No. EP 0 446 251 A1; Vijgenboom et al., 1994, Microbiology 140:983-998) and, as revealed as part of this invention, in several enterococcal species. In several bacterial species, tuf is organized in an operon with its homolog gene for the elongation factor G (EF-G) encoded by the fusA gene (FIG. 3). This operon is often named the str operon. The tuf fus, atpD and recA genes were chosen as they are well conserved in evolution and have highly conserved stretches as well as more variable segments. Moreover, these four genes have eukaryotic orthologs which are described in the present invention as targets to identify fungi and parasites. The eukaryotic homolog of elongation factor Tu is called elongation factor 1-alpha (EF-1α) (gene name: tef, tef1, ef1, ef-1 or EF-1). In fungi, the gene for EF-1α occurs sometimes in two or more highly similar duplicated copies (often named tef1, tef2, tef3 . . . ). In addition, eukaryotes have a copy of elongation factor Tu which is originating from their organelle genome ancestry (gene name: tuf1, tufM or tufA). For the purpose of the current invention, the genes for these four functionally and evolutionarily linked elon-gation factors (bacterial EF-Tu and EF-G, eukaryotic EF-1α, and organellar EF-Tu) will hereafter be designated as <<tuf nucleic acids and/or sequences>>. The eukaryotic (mitochondrial) F₀F₁ type ATP-synthase beta subunit gene is named atp2 in yeast. For the purpose of the current invention, the genes of catalytic sub-unit of either F or V-type ATP-synthase will hereafter be designated as <<atpD nucleic acids and/or sequences>>. The eukaryotic homologs of RecA are distributed in two families, typified by the Rad51 and Dmc1 proteins. Archaeal homologs of RecA are called RadA. For the purpose of the current invention, the genes corres-ponding to the latter proteins will hereafter be designated as <<recA nucleic acids and/or sequences>>.

[0078] In the description of this invention, the terms <<nucleic acids>> and <<sequences>> might be used interchangeably. However, <<nucleic acids>> are chemical entities while <<sequences>> are the pieces of information derived from (inherent to) these <<nucleic acids>>. Both nucleic acids and sequences are equiva-lently valuable sources of information for the matter pertaining to this invention.

[0079] Analysis of multiple sequence alignments of tuf and atpD sequences permitted the design of oligonucleotide primers (and probes) capable of amplifying (or hybridizing to) segments of tuf (and/or fus) and atpD genes from a wide variety of bacterial species (see Examples 1 to 4, 24 and 26, and Table 7). Sequencing and amplification primer pairs for tuf nucleic acids and/or sequences are listed in Annex I and hybridization probes are listed in Annexes III and XLVII. Sequencing and amplification primer pairs for atpD nucleic acids and/or sequences are listed in Annex II. Analysis of the main subdivisions of tuf and atpD sequences (see FIGS. 1 and 2) permitted to design sequencing primers amplifying specifically each of these subdivisions. It should be noted that these sequencing primers could also be used as universal primers. However, since some of these sequencing primers include several variable sequence (degenerated) positions, their sensitivity could be lower than that of universal primers developed for diagnostic purposes. Further subdivisions could be done on the basis of the various phyla where these genes are encountered.

[0080] Similarly, analysis of multiple sequence alignments of recA sequences present in the public databases permitted the design of oligonucleotide primers capable of amplifying segments of recA genes from a wide variety of bacterial species. Sequencing and amplification primer pairs for recA sequences are listed in Annex XXI. The main subdivisions of recA nucleic acids and/or sequences comprise recA, radA, rad51 and dmc1. Further subdivisions could be done on the basis of the various phyla where these genes are encountered.

[0081] The present inventor's strategy is to get as much sequence data information from the four conserved genes (tuf, fus, atpD and recA). This ensemble of sequence data forming a repertory (with subrepertories corresponding to each target gene and their main sequence subdivisions) and then using the sequence information of the sequence repertory (or subrepertories) to design primer pairs that could permit either universal detection of algae or archaea or bacteria or fungi or parasites, detection of a family or group of microorganism (e.g. Enterobacteriaceae), detection of a genus (e.g. Streptococcus) or finally a specific species (e.g. Staphylococcus aureus). It should be noted that for the purpose of the present invention a group of microorganisms is defined depending on the needs of the particular diagnostic test. It does not need to respect a particular taxonomical grouping or phylum. See Example 12 where primers were designed to amplify a group a bacteria consisting of the 17 major bacterial species encountered as contaminants of platelet concentrates. Also remark that in that Example, the primers are not only able to sensitively and rapidly detect at least the 17 important bacterial species, but could also detect other species as well, as shown in Table 14. In these circumstances the primers shown in Example 12 are considered universal for platelet-contaminating bacteria. To develop an assay specific for the latter, one or more primers or probes specific to each species could be designed. Another example of primers and/or probes for group detection is given by the Pseudomonad group primers. These primers were designed based upon alignment of tuf sequences from real Pseudomonas species as well as from former Pseudomonas species such as Stenotrophomonas maltophilia. The resulting primers are able to amplify all Pseudomonas species tested as well as several species belonging to different genera, hence as being specific for a group including Pseudomonas and other species, we defined that group as Pseudomonads, as several members were former Pseudomonas.

[0082] For certain applications, it may be possible to develop a universal, group, family or genus-specific reaction and to proceed to species identification using sequence information within the amplicon to design species-specific internal probes or primers, or alternatively, to proceed directly by sequencing the amplicon. The various strategies will be discussed further below.

[0083] The ensembles formed by public and proprietary tuf, atpD and recA nucleic acids and/or sequences are used in a novel fashion so they constitute three databases containing useful information for the identification of microorganisms.

[0084] Sequence repertories of other gene targets were also built to solve some specific identification problems especially for microbial species genetically very similar to each other such as E. coli and Shigella (see Example 23). Based on tuf, atpD and recA sequences, Streptococcus pneumoniae is very difficult to differentiate from the closely related species S. oralis and S. mitis. Therefore, we elected to built a sequence repertory from hexA sequences (Example 19), a gene much more variable than our highly conserved tuf, atpD and recA nucleic acids and/or sequences.

[0085] For the detection of mutations associated with antibiotic resistance genes, we also built repertories to distinguish between point mutations reflecting only gene diversity and point mutations involved in resistance. This was done for pbp1a, pbp2b and pbp2x genes of penicillin-resistant and sensitive Streptoccoccus pneumoniae (Example 18) and also for gyrA and parC gene fragments of various bacterial species for which quinolone resistance is important to monitor.

### Oligonucleotide Primers and Probes Design and Synthesis

[0086] The tuf fus, atpD and recA DNA fragments sequenced by us and/or selected from public databases (GenBank and EMBL) were used to design oligonucleotides primers and probes for diagnostic purposes. Multiple sequence alignments were made using subsets of the tuf or atpD or recA sequences repertory. Subsets were chosen to encompass as much as possible of the targetted microorganism(s) DNA sequence data and also include sequence data from phylogenetically related microorganisms from which the targetted microorganism(s) should be distinguished. Regions suitable for primers and probes should be conserved for the targetted microorganism(s) and divergent for the microorganisms from which the targetted microorganism(s) should be distinguished. The large amount of tuf or atpD or recA sequences data in our repertory permits to reduce trial and errors in obtaining specific and ubiquitous primers and probes. We also relied on the corresponding peptide sequences of tuf, fus, atpD and recA nucleic acids and/or sequences to facilitate the identification of regions suitable for primers and probes design. As part of the design rules, all oligonucleotides (probes for hybridization and primers for DNA amplification by PCR) were evaluated for their suitability for hybridization or PCR amplification by computer analysis using standard programs (i.e. the Genetics Computer Group (GCG) programs and the primer analysis software Oligo™ 5.0). The potential suitability of the PCR primer pairs was also evaluated prior to the synthesis by verifying the absence of unwanted features such as long stretches of one nucleotide and a high proportion of G or C residues at the 3′ end (Persing et al., 1993, Diagnostic Molecular Microbiology: Principles and Applications, American Society for Microbiology, Washington, D.C.). Oligonucleotide probes and amplification primers were synthesized using an automated DNA synthesizer (Perkin-Elmer Corp., Applied Biosystems Division).

[0087] The oligonucleotide sequence of primers or probes may be derived from either strand of the duplex DNA. The primers or probes may consist of the bases A, G, C, or T or analogs and they may be degenerated at one or more chosen nucleotide position(s). The primers or probes may be of any suitable length and may be selected anywhere within the DNA sequences from proprietary fragments or from selected database sequences which are suitable for (i) the universal detection of algae or archaea or bacteria or fingi or parasites, (ii) the species-specific detection and identification of any microorganism, including but not limited to: Abiotrophia adiacens, Bacteroides fragilis, Bordetella pertussis, Candida albicans, Candida dubliniensis, Candida glabrata, Candida guilliermondii, Candida krusei, Candida lusitaniae, Candida parapsilosis, Candida tropicalis, Candida zeylanoides, Campylobacter jejuni and C. coli, Chlamydia pneumoniae, Chlamydia trachomatis, Cryptococcus neoformans, Cryptosporidium parvum, Enterococcus faecalis, Enterococcus faecium, Enterococcus gallinarum, Escherichia coli, Haemophilus influenzae, Legionella pneumophila, Mycoplasma pneumoniae, Neisseria gonorrhoeae, Pseudomonas aeruginosa, Staphylococcus aureus, Staphylococcus epidermidis, Staphylococcus haemolyticus, Staphylococcus hominis, Staphylococcus saprophyticus, Streptococcus agalactiae, Streptococcus pneumoniae, Trypanosoma brucei, Trypanosoma cruzi, (iii) the genus-specific detection of Bordetella species, Candida species, Clostridium species, Corynebacterium species, Cryptococcus species, Entamoeba species, Enterococcus species, Gemella species, Giardia species, Legionella species, Leishmania species, Staphylococcus species, Streptococcus species, Trypanosoma species, (iv) the family-specific detection of Enterobacteriaceae family members, Mycobacteriaceae family members, Trypanosomatidae family members, (v) the detection of Enterococcus casseliflavus-flavescens-gallinarum group, Enterococcus, Gemella and Abiotrophia adiacens group, Pseudomonads extended group, Platelet-contaminating bacteria group, (vi) the detection of clinically important antimicrobial agents resistance genes listed in Table 5, (vii) the detection of clinically important toxin genes listed in Table 6.

[0088] Variants for a given target microbial gene are naturally occurring and are attributable to sequence variation within that gene during evolution (Watson et al., 1987, Molecular Biology of the Gene, 4^{th} ed., The Benjamin/Cummings Publishing Company, Menlo Park, Calif., Lewin, 1989, Genes IV, John Wiley & Sons, New York, N.Y.). For example, different strains of the same microbial species may have a single or more nucleotide variation(s) at the oligonucleotide hybridization site. The person skilled in the art is well aware of the existence of variant algal, archaeal, bacterial, fungal or parasitical DNA nucleic acids and/or sequences for a specific gene and that the frequency of sequence variations depends on the selective pressure during evolution on a given gene product. The detection of a variant sequence for a region between two PCR primers may be demonstrated by sequencing the amplification product. In order to show the presence of sequence variants at the primer hybridization site, one has to amplify a larger DNA target with PCR primers outside that hybridization site. Sequencing of this larger fragment will allow the detection of sequence variation at this site. A similar strategy may be applied to show variants at the hybridization site of a probe. Insofar as the divergence of the target nucleic acids and/or sequences or a part thereof does not affect the specificity and ubiquity of the amplification primers or probes, variant microbial DNA is under the scope of this invention. Variants of the selected primers or probes may also be used to amplify or hybridize to a variant DNA.

Sequencing of tuf Nucleic Acids and/or Sequences from a Variety of Archaeal, Bacterial, Fungal and Parasitical Species

[0089] The nucleotide sequence of a portion of tuf nucleic acids and/or sequences was determined for a variety of archaeal, bacterial, fungal and parasitical species. The amplification primers (SEQ ID NOs. 664 and 697), which amplify a tuf gene portion of approximately 890 bp, were used along with newly designed sequencing primer pairs (See Annex I for the sequencing primers for tuf nucleic acids and/or sequences). Most primer pairs can amplify different copies of tuf genes (tufA and tufB). This is not surprising since it is known that for several bacterial species these two genes are nearly identical. For example, the entire tufA and tufB genes from E. coli differ at only 13 nucleotide positions (Neidhardt et al., 1996, Escherichia coli and Salmonella: Cellular and Molecular Biology, 2^{nd} ed., American Society for Microbiology Press, Washington, D.C.). Similarly, some fungi are known to have two nearly identical copies of tuf nucleic acids and/or sequences (EF-1□). These amplification primers are degenerated at several nucleotide positions and contain inosines in order to allow the amplification of a wide range of tuf nucleic acids and/or sequences. The strategy used to select these amplification primers is similar to that illustrated in Annex I for the selection of universal primers. The tuf sequencing primers even sometimes amplified highly divergent copies of tuf genes (tufC) as illustrated in the case of some enterococcal species (SEQ ID NOs.: 73, 75, 76, 614 to 618, 621 and 987 to 989). To prove this, we have determined the enterococcal tuf nucleic acids and/or sequences from PCR amplicons cloned into a plasmid vector. Using the sequence data from the cloned amplicons, we designed new sequencing primers specific to the divergent (tufC) copy of enterococci (SEQ ID NOs.: 658-659 and 661) and then sequenced directly the tufC amplicons. The amplification primers (SEQ ID NOs.: 543, 556, 557, 643-645, 660, 664, 694, 696 and 697) could be used to amplify the tuf nucleic acids and/or sequences from any bacterial species. The amplification primers (SEQ ID NOs.: 558, 559, 560, 653, 654, 655, 813, 815, 1974-1984, 1999-2003) could be used to amplify the tuf (EF-1 [symbol] genes from any fungal and/or parasitical species. The amplification primers SEQ ID NOs. 1221-1228 could be used to amplify bacterial tuf nucleic acids and/or sequences of the EF-G subdivision (fusA) (FIG. 3). The amplification primers SEQ ID NOs. 1224, and 1227-1229 could be used to amplify bacterial tuf nucleic acids and/or sequences comprising the end of EF-G (fusA) and the beginning of EF-Tu (tuf), including the intergenic region, as shown in FIG. 3.

[0090] Most tuf fragments to be sequenced were amplified using the following amplification protocol: One μl of cell suspension (or of purified genomic DNA 0.1-100 ng/μl) was transferred directly to 19 μl of a PCR reaction mixture. Each PCR reaction contained 50 mM KCl, 10 mM Tris-HCl (pH 9.0), 0.1% Triton X-100, 2.5 mM MgCl₂, 1 μM of each of the 2 primers, 200 μM of each of the four dNTPs, 0.5 unit of Taq DNA polymerase (Promega Corp., Madison, Wis.). PCR reactions were subjected to cycling using a PTC-200 thermal cycler (MJ Research Inc., Watertown, Mass.) as follows: 3 min at 94-96° C. followed by 30-45 cycles of 1 min at 95° C. for the denaturation step, 1 min at 50-55° C. for the annealing step and 1 min at 72° C. for the extension step. Subsequently, twenty microliters of the PCR-amplified mixture were resolved by electrophoresis in a 1.5% agarose gel. The amplicons were then visualized by staining with methylene blue (Flores et al., 1992, Biotechniques, 13:203-205). The size of the amplification products was estimated by comparison with a 100-bp molecular weight ladder. The band corresponding to the specific amplification product was excised from the agarose gel and purified using the QIAquick™ gel extraction kit (QIAGEN Inc., Chatsworth, Calif.). The gel-purified DNA fragment was then used directly in the sequencing protocol. Both strands of the tuf genes amplification product were sequenced by the dideoxynucleotide chain termination sequencing method by using an Applied Biosystems automated DNA sequencer (model 377) with their Big Dye™ Terminator Cycle Sequencing Ready Reaction Kit (Applied Biosystems, Foster City, Calif.). The sequencing reactions were performed by using the same amplification primers and 10 ng/100 bp of the gel-purified amplicon per reaction. For the sequencing of long amplicons such as those of eukaryotic tuf (EF-1 [symbol] nucleic acids and/or sequences, we designed internal sequencing primers (SEQ ID NOs.: 654, 655 and 813) to be able to obtain sequence data on both strands for most of the fragment length. In order to ensure that the determined sequence did not contain errors attributable to the sequencing of PCR artefacts, we have sequenced two preparations of the gel-purified tuf amplification product originating from two independent PCR amplifications. For most target microbial species, the sequences determined for both amplicon preparations were identical. In case of discrepancies, amplicons from a third independent PCR amplification were sequenced. Furthermore, the sequences of both strands were 100% complementary thereby confirming the high accuracy of the determined sequence. The tuf nucleic acids and/or sequences determined using the above strategy are described in the Sequence Listing. Table 7 gives the originating microbial species and the source for each tuf sequence in the Sequence Listing.

[0091] The alignment of the tuf sequences determined by us or selected from databases revealed clearly that the length of the sequenced portion of the tuf genes is variable. There may be insertions or deletions of several amino acids. In addition, in several fungi introns were observed. Intron nucleic acids and/or sequences are part of tuf nucleic acids and/or sequences and could be useful in the design of species-specific primers and probes. This explains why the size of the sequenced tuf amplification products was variable from one fungal species to another. Consequently, the nucleotide positions indicated on top of each of Annexes IV to XX, XXIII to XXXI, XXXVIII and XLII do not correspond for sequences having insertions or deletions.

[0092] It should also be noted that the various tuf nucleic acids and/or sequences determined by us occasionally contain base ambiguities. These degenerated nucleotides correspond to sequence variations between tufA and tufB genes (or copies of the EF-G subdivision of tuf nucleic acids and/or sequences, or copies of EF-1- [symbol] subdivision of tuf nucleic acids and/or sequences for fingi and parasites) because the amplification primers amplify both tuf genes. These nucleotide variations were not attributable to nucleotide misincorporations by the Taq DNA polymerase because the sequence of both strands was identical and also because the sequences determined with both preparations of the gel-purified tuf amplicons obtained from two independent PCR amplifications were identical.

The Selection of Amplification Primers from tuf Nucleic Acids and/or Sequences

[0093] The tuf sequences determined by us or selected from public databases were used to select PCR primers for universal detection of bacteria, as well as for genus-specific, species-specific family-specific or group-specific detection and identification. The strategy used to select these PCR primers was based on the analysis of multiple sequence alignments of various tuf sequences. For more details about the selection of PCR primers from tuf sequences please refer to Examples 5, 7-14, 17, 22, 24, 28, 30-31, 33, 36, and 38-40, and to Annexes VI-IX, XI-XIX and XXV.

Sequencing of atpD and recA Nucleic Acids and/or Sequences from a Variety of Archaeal, Bacterial, Fungal and Parasitical Species

[0094] The method used to obtain atpD and recA nucleic acids and/or sequences is similar to that described above for tuf nucleic acids and/or sequences.

The Selection of Amplification Primers from atpD or recA Nucleic Acids and/or Sequences

[0095] The comparison of the nucleotide sequence for the atpD or recA genes from various archaeal, bacterial, fungal and parasitical species allowed the selection of PCR primers (refer to Examples 6, 13, 29, 34 and 37, and to Annexes IV, V, X, and XX).

### DNA Amplification

[0096] For DNA amplification by the widely used PCR (polymerase chain reaction) method, primer pairs were derived from proprietary DNA fragments or from database sequences. Prior to synthesis, the potential primer pairs were analyzed by using the Oligo™ 5.0 software to verify that they were good candidates for PCR amplification.

[0097] During DNA amplification by PCR, two oligonucleotide primers binding respectively to each strand of the heat-denatured target DNA from the microbial genome are used to amplify exponentially in vitro the target DNA by successive thermal cycles allowing denaturation of the DNA, annealing of the primers and synthesis of new targets at each cycle (Persing et al, 1993, Diagnostic Molecular Microbiology: Principles and Applications, American Society for Microbiology, Washington, D.C.).

[0098] Briefly, the PCR protocols were as follows: Treated clinical specimens or standardized bacterial or fungal or parasitical suspensions (see below) or purified genomic DNA from bacteria, fungi or parasites were amplified in a 20 μl PCR reaction mixture. Each PCR reaction contained 50 mM KCl, 10 mM Tris-HCl (pH 9.0), 2.5 mM MgCl₂, 0.4 μM of each primer, 200 μM of each of the four dNTPs and 0.5 unit of Taq DNA polymerase (Promega) combined with the TaqStart™ antibody (Clontech Laboratories Inc., Palo Alto, Calif.). The TaqStart™ antibody, which is a neutralizing monoclonal antibody to Taq DNA polymerase, was added to all PCR reactions to enhance the specificity and the sensitivity of the amplifications (Kellogg et al., 1994, Biotechniques 16:1134-1137). The treatment of the clinical specimens varies with the type of specimen tested, since the composition and the sensitivity level required are different for each specimen type. It consists in a rapid protocol to lyse the microbial cells and eliminate or neutralize PCR inhibitors. For amplification from bacterial or fungal or parasitical cultures or from purified genomic DNA, the samples were added directly to the PCR amplification mixture without any pre-treatment step. An internal control was derived from sequences not found in the target microorganisms or in the human genome. The internal control was integrated into all amplification reactions to verify the efficiency of the PCR assays and to ensure that significant PCR inhibition was absent. Alternatively, an internal control derived from rRNA was also useful to monitor the efficiency of microbial lysis protocols.

[0099] PCR reactions were then subjected to thermal cycling (3 min at 94-96° C. followed by 30 cycles of 1 second at 95° C. for the denaturation step and 30 seconds at 50-65° C. for the annealing-extension step) using a PTC-200 thermal cycler (NJ Research Inc.). The number of cycles performed for the PCR assays varies according to the sensitivity level required. For example, the sensitivity level required for microbial detection directly from clinical specimens is higher for blood specimens than for urine specimens because the concentration of microorganisms associated with a septicemia can be much lower than that associated with a urinary tract infection. Consequently, more sensitive PCR assays having more thermal cycles are probably required for direct detection from blood specimens. Similarly, PCR assays performed directly from bacterial or fungal or parasitical cultures may be less sensitive than PCR assays performed directly from clinical specimens because the number of target organisms is normally much lower in clinical specimens than in microbial cultures.

[0100] The person skilled in the art of DNA amplification knows the existence of other rapid amplification procedures such as ligase chain reaction (LCR), transcription-mediated amplification (TMA), self-sustained sequence replication (3SR), nucleic acid sequence-based amplification (NASBA), strand displacement amplification (SDA), branched DNA (bDNA), cycling probe technology (CPT), solid phase amplification (SPA), rolling circle amplification technology (RCA), solid phase RCA, anchored SDA and nuclease dependent signal amplification (NDSA) (Lee et al., 1997, Nucleic Acid Amplification Technologies: Application to Disease Diagnosis, Eaton Publishing, Boston, Mass.; Persing et al., 1993, Diagnostic Molecular Microbiology: Principles and Applications, American Society for Microbiology, Washington, D.C.; Westin et al., 2000, Nat. Biotechnol. 18:199-204). The scope of this invention is not limited to the use of amplification by PCR, but rather includes the use of any rapid nucleic acid amplification method or any other procedure which may be used to increase the sensitivity and/or the rapidity of nucleic acid-based diagnostic tests. The scope of the present invention also covers the use of any nucleic acids amplification and detection technology including real-time or post-amplification detection technologies, any amplification technology combined with detection, any hybridization nucleic acid chips or arrays technologies, any amplification chips or combination of amplification and hybridization chips technologies. Detection and identification by any sequencing method is also under the scope of the present invention.

[0101] Any oligonucleotide suitable for the amplification of nucleic acids by approaches other than PCR or for DNA hybridization which are derived from the species-specific, genus-specific and universal DNA fragments as well as from selected antimicrobial agents resistance or toxin gene sequences included in this document are also under the scope of this invention.

### Detection of Amplification Products

[0102] Classically, detection of amplification is performed by standard ethidium bromide-stained agarose gel electrophoresis. It is clear that other methods for the detection of specific amplification products, which may be faster and more practical for routine diagnosis, may be used. Such methods may be based on the detection of fluorescence after or during amplification. One simple method for monitoring amplified DNA is to measure its rate of formation by measuring the increase in fluorescence of intercalating agents such as ethidium bromide or SYBR® Green I (Molecular Probes). If more specific detection is required, fluorescence-based technologies can monitor the appearance of a specific product during the reaction. The use of dual-labeled fluorogenic probes such as in the TaqMan™ system (Applied Biosystems) which utilizes the 5′-3′ exonuclease activity of the Taq polymerase is a good example (Livak K. J. et al. 1995, PCR Methods Appl. 4:357-362). TaqMan™ can be performed during amplification and this “real-time” detection can be done in a single closed tube hence eliminating post-PCR sample handling and consequently preventing the risk of amplicon carryover. Several other fluorescence-based detection methods can be performed in real-time. Fluorescence resonance energy transfer (FRET) is the principle behind the use of adjacent hybridization probes (Wittwer, C. T. et al. 1997. BioTechniques 22:130-138), molecular beacons (Tyagi S, and Kramer F. R. 1996. Nature Biotechnology 14:303-308) and scorpions (Whitcomb et al. 1999. Nature Biotechnology 17:804-807). Adjacent hybridization probes are designed to be internal to the amplification primers. The 3′ end of one probe is labelled with a donor fluorophore while the 5′ end of an adjacent probe is labelled with an acceptor fluorophore. When the two probes are specifically hybridized in closed proximity (spaced by 1 to 5 nucleotides) the donor fluorophore which has been excited by an external light source emits light that is absorbed by a second acceptor that emit more fluorescence and yields a FRET signal. Molecular beacons possess a stem-and-loop structure where the loop is the probe and at the bottom of the stem a fluorescent moiety is at one end while a quenching moiety is at the other end. The beacons undergo a fluorogenic conformational change when they hybridize to their targets hence separating the fluorochrome from its quencher. The FRET principle is also used in an air thermal cycler with a built-in fluorometer (Wittwer, C. T. et al. 1997. BioTechniques 22:130-138). The amplification and detection are extremely rapid as reactions are performed in capillaries: it takes only 18 min to complete 45 cycles. Those techniques are suitable especially in the case where few pathogens are searched for. Boehringer-Roche Inc. sells the LightCycler™, and Cepheid makes the SmartCycler. These two apparatus are capable of rapid cycle PCR combined with fluorescent SYBR® Green I or FRET detection. We recently demonstrated in our laboratory, real-time detection of 10 CFU in less than 40 minutes using adjacent hybridization probes on the LightCycler™. Methods based on the detection of fluorescence are particularly promising for utilization in routine diagnosis as they are very rapid, quantitative and can be automated.

[0103] Microbial pathogens detection and identification may also be performed by solid support or liquid hybridization using species-specific internal DNA probes hybridizing to an amplification product. Such probes may be generated from any sequence from our repertory and designed to specifically hybridize to DNA amplification products which are objects of the present invention. Alternatively, the internal probes for species or genus or family or group detection and identification may be derived from the amplicons produced by a universal, family-, group-, genus- or species-specific amplification assay(s). The oligonucleotide probes may be labeled with biotin or with digoxigenin or with any other reporter molecule (for more details see below the section on hybrid capture). Hybrization on a solid support is amendable to miniaturization.

[0104] At present the oligonucleotide nucleic acid microarray technology is appealing. Currently, available low to medium density arrays (Heller et al., An integrated microelectronics hybridization system for genomic research and diagnostic applications. In: Harrison, D. J., and van den Berg, A., 1998, Micro total analysis systems '98, Kluwer Academic Publisher, Dordrecht.) could specifically capture fluorescent-labelled amplicons. Detection methods for hybridization are not limited to fluorescence; potentiometry, colorimetry and plasmon resonance are some examples of alternative detection methods. In addition to detection by hybridization, nucleic acid microarrays could be used to perform rapid sequencing by hybridization. Mass spectrometry could also be applicable for rapid identification of the amplicon or even for sequencing of the amplification products (Chiu and Cantor, 1999, Clinical Chemistry 45:1578; Berkenkamp et al., 1998, Science 281:260).

[0105] For the future of our assay format, we also consider the major challenge of molecular diagnostics tools, i.e.: integration of the major steps including sample preparation, genetic amplification, detection, data analysis and presentation (Anderson et al., Advances in integrated genetic analysis. In: Harrison, D. J., and van den Berg, A., 1998, Micro total analysis systems '98, Kluwer Academic Publisher, Dordrecht.).

[0106] To ensure PCR efficiency, glycerol, dimethyl sulfoxide (DMSO) or other related solvents can be used to increase the sensitivity of the PCR and to overcome problems associated with the amplification of a target DNA having a high GC content or forming strong secondary structures (Dieffenbach and Dveksler, 1995, PCR Primer: A Laboratory Manual, Cold Spring Harbor Laboratory Press, Plainview, N.Y.). The concentration ranges for glycerol and DMSO are 5-15% (v/v) and 3-10% (v/v), respectively. For the PCR reaction mixture, the concentration ranges for the amplification primers and MgCl₂ are 0.1-1.5 μM and 1.0-10.0 mM, respectively. Modifications of the standard PCR protocol using external and nested primers (i.e. nested PCR) or using more than one primer pair (i.e. multiplex PCR) may also be used (Persing et al., 1993, Diagnostic Molecular Microbiology: Principles and Applications, American Society for Microbiology, Washington, D.C.). For more details about the PCR protocols and amplicon detection methods, see Examples.

### Hybrid Capture and Chemiluminescence Detection of Amplification Products

[0107] Hybridization and detection of amplicons by chemiluminescence were adapted from Nikiforov et al. (1994, PCR Methods and Applications 3:285-291 and 1995, Anal. Biochem. 227:201-209) and from the DIG™ system protocol of Boehringer Mannheim. Briefly, 50 μl of a 25 picomoles solution of capture probe diluted in EDC {1-ethyl-3-(3-dimethylaminopropyl) carbodiimide hydrochloride} are immobilized in each well of 96-wells plates (Microlite™ 2, Dynex) by incubation overnight at room temperature. The next day, the plates are incubated with a solution of 1% BSA diluted into TNTw (10 mM Tris-HCl, pH 7.5; 150 mM NaCl; 0.05% Tween™ 20) for 1 hour at 37° C. The plates are then washed on a Wellwash Ascent™ (Labsystems) with TNTw followed by Washing Buffer (100 mM maleic acid pH7.5; 150 mM NaCl; 0.3% Tween™ 20).

[0108] The amplicons were labelled with DIG-11-dUTP during PCR using the PCR DIG Labelling Mix from Boehringer Mannheim according to the manufacturer's instructions. Hybridization of the amplicons to the capture probes is performed in triplicate at stringent temperature (generally, probes are designed to allow hybrization at 55° C., the stringent temperature) for 30 minutes in 1.5 M NaCl; 10 mM EDTA. It is followed by two washes in 2×SSC; 0.1% SDS, then by four washes in 0.1×SSC; 0.1% SDS at the stringent temperature (55° C.). Detection with 1,2 dioxetane chemiluminescent alkaline phosphatase substrates like CSPD® (Tropix Inc.) is performed according to the manufacturer's instructions but with shorter incubations times and a different antibody concentration. The plates are agitated at each step, the blocking incubation is performed for only 5 minutes, the anti-DIG-AP1 is used at a 1:1000 dilution, the incubation with antibody lasts 15 minutes, the plates are washed twice for only 5 minutes. Finally, after a 2 minutes incubation into the detection buffer, the plates are incubated 5 minutes with CSPD® at room temperature followed by a 10 minutes incubation at 37° C. without agitation. Luminous signal detection is performed on a Dynex Microtiter Plate Luminometer using RLU (Relative Light Units).

### Specificity, Ubiquity and Sensitivity Tests for Oligonucleotide Primers and Probes

[0109] The specificity of oligonucleotide primers and probes was tested by amplification of DNA or by hybridization with bacterial or fungal or parasitical species selected from a panel comprising closely related species and species sharing the same anatomo-pathological site (see Annexes and Examples). All of the bacterial, fungal and parasitical species tested were likely to be pathogens associated with infections or potential contaminants which can be isolated from clinical specimens. Each target DNA could be released from microbial cells using standard chemical and/or physical treatments to lyse the cells (Sambrook et al., 1989, Molecular Cloning: A Laboratory Manual, 2^{nd} ed., Cold Spring Harbor Laboratory Press, Cold Spring Harbor, N.Y.) or alternatively, genomic DNA purified with the GNOME™ DNA kit (Bio101, Vista, Calif.) was used. Subsequently, the DNA was subjected to amplification with the primer pairs. Specific primers or probes amplified only the target microbial species, genus, family or group.

[0110] Oligonucleotides primers found to amplify specifically the target species, genus, family or group were subsequently tested for their ubiquity by amplification (i.e. ubiquitous primers amplified efficiently most or all isolates of the target species or genus or family or group). Finally, the sensitivity of the primers or probes was determined by using 10-fold or 2-fold dilutions of purified genomic DNA from the targeted microorganism. For most assays, sensitivity levels in the range of 1-100 copies were obtained. The specificity, ubiquity and sensitivity of the PCR assays using the selected amplification primer pairs were tested either directly from cultures of microbial species or from purified microbial genomic DNA.

[0111] Probes were tested in hybrid capture assays as described above. An oligonucleotide probe was considered specific only when it hybridized solely to DNA from the species or genus or family or group from which it was selected. Oligonucleotide probes found to be specific were subsequently tested for their ubiquity (i.e. ubiquitous probes detected efficiently most or all isolates of the target species or genus or family or group) by hybridization to microbial DNAs from different clinical isolates of the species or genus or family or group of interest including ATCC reference strains. Similarly, oligonucleotide primers and probes could be derived from antimicrobial agents resistance or toxin genes which are objects of the present invention.

### Reference Strains

[0112] The reference strains used to build proprietary tuf, atpD and recA sequence data subrepertories, as well as to test the amplification and hybridization assays were obtained from (i) the American Type Culture Collection (ATCC), (ii) the Laboratoire de santé publique du Quebec (LSPQ), (iii) the Centers for Disease Control and Prevention (CDC), (iv) the National Culture Type Collection (NCTC) and (v) several other reference laboratories throughout the world. The identity of our reference strains was confirmed by phenotypic testing and reconfirmed by analysis of tuf, atpD and recA sequences (see Example 13).

### Antimicrobial Agents Resistance Genes

[0113] Antimicrobial resistance complicates treatment and often leads to therapeutic failures. Furthermore, overuse of antibiotics inevitably leads to the emergence of microbial resistance. Our goal is to provide clinicians, in approximately one hour, the needed information to prescribe optimal treatments. Besides the rapid identification of negative clinical specimens with DNA-based tests for universal algal, archaeal, bacterial, fungal or parasitical detection and the identification of the presence of a specific pathogen in the positive specimens with species- and/or genus- and/or family- and/or group-specific DNA-based tests, clinicians also need timely information about the ability of the microbial pathogen to resist antibiotic treatments. We feel that the most efficient strategy to evaluate rapidly microbial resistance to antimicrobials is to detect directly from the clinical specimens the most common and clinically important antimicrobial agents resistance genes (i.e. DNA-based tests for the specific detection of antimicrobial agents resistance genes). Since the sequence from the most important and common antimicrobial agents resistance genes are available from public databases, our strategy is to use the sequence from a portion or from the entire resistance gene to design specific oligonucleotide primers or probes which will be used as a basis for the development of sensitive and rapid DNA-based tests. The list of each of the antimicrobial agents resistance genes selected on the basis of their clinical relevance (i.e. high incidence and importance) is given in Table 5; descriptions of the designed amplification primers and internal probes are given in Annexes XXXIV-XXXVII, XXXIX, XLV, and L-LI. Our approach is unique because the antimicrobial agents resistance genes detection and the microbial detection and identification can be performed simultaneously, or independently, or sequentially in multiplex or parallel or sequential assays under uniform PCR amplification conditions. These amplifications can also be done separately.

### Toxin Genes

[0114] Toxin identification is often very important to prescribe optimal treatments. Besides the rapid identification of negative clinical specimens with DNA-based tests for universal bacterial detection and the identification of the presence of a specific pathogen in the positive specimens with species- and/or genus- and/or family- and/or group-specific DNA-based tests, clinicians sometimes need timely information about the ability of certain bacterial pathogens to produce toxins. Since the sequence from the most important and common bacterial toxin genes are available from public databases, our strategy is to use the sequence from a portion or from the entire toxin gene to design specific oligonucleotide primers or probes which will be used as a basis for the development of sensitive and rapid DNA-based tests. The list of each of the bacterial toxin genes selected on the basis of their clinical relevance (i.e. high incidence and importance) is given in Table 6; descriptions of the designed amplification primers and internal probes are given in Annexes XXII, XXXII and XXXIII. Our approach is unique because the toxin genes detection and the bacterial detection and identification can be performed simultaneously, or independently, or sequentially, in multiplex or parallel or sequential assays under uniform PCR amplification conditions. These amplifications can also be done separately.

### Universal Bacterial Detection

[0115] In the routine microbiology laboratory, a high percentage of clinical specimens sent for bacterial identification are negative by culture. Testing clinical samples with universal amplification primers or universal probes to detect the presence of bacteria prior to specific identification and screening out the numerous negative specimens is thus useful as it reduces costs and may rapidly orient the clinical management of the patients. Several amplification primers and probes were therefore synthesized from highly conserved portions of bacterial sequences from the tuf, atpD and recA nucleic acids and/or sequences. The universal primers selection was based on a multiple sequence alignment constructed with sequences from our repertory.

[0116] All computer analysis of amino acid and nucleotide sequences were performed by using the GCG programs. Subsequently, optimal PCR primers for the universal amplification of bacteria were selected with the help of the Oligo™ program. The selected primers are degenerated at several nucleotide positions and contain several inosines in order to allow the amplification of all clinically relevant bacterial species. Inosine is a nucleotide analog able to specifically bind to any of the four nucleotides A, C, G or T. Degenerated oligonucleotides consist of an oligonucleotide mix having two or more of the four nucleotides A, C, G or T at the site of mismatches. The inclusion of inosine and/or of base ambiguities in the amplification primers allow mismatch tolerance thereby permitting the amplification of a wider array of target nucleotide sequences (Dieffenbach and Dveksler, 1995 PCR Primer: A Laboratory Manual, Cold Spring Harbor Laboratory Press, Plainview, N.Y.).

[0117] The amplification conditions with the universal primers are very similar to those used for the species- and genus-specific amplification assays except that the annealing temperature is slightly lower. The original universal PCR assay described in our assigned WO98/20157 (SEQ ID NOs. 23-24 of the latter application) was specific and nearly ubiquitous for the detection of bacteria. The specificity for bacteria was verified by amplifying genomic DNA isolated from the 12 fungal species as well as genomic DNA from Leishmania donovani, Saccharomyces cerevisiae and human lymphocytes. None of the above eukaryotic DNA preparations could be amplified by the universal assay, thereby suggesting that this test is specific for bacteria. The ubiquity of the universal assay was verified by amplifying genomic DNAs from 116 reference strains which represent 95 of the most clinically relevant bacterial species. These species have been selected from the bacterial species listed in Table 4. We found that at least 104 of these strains could be amplified. However, the assay could be improved since bacterial species which could not be amplified with the original tuf nucleic acids and/or sequences-based assay included species belonging to the following genera: Corynebacterium (11 species) and Stenotrophomonas (1 species). Sequencing of the tuf genes from these bacterial species and others has been performed in the scope of the present invention in order to improve the universal assay. This sequencing data has been used to select new universal primers which may be more ubiquitous and more sensitive. Also, we improved our primer and probes design strategy by taking into consideration the phylogeny observed in analysing our repertory of tuf, atpD and recA sequences. Data from each of the 3 main subrepertories (tuf atpD and recA) was subjected to a basic phylogenic analysis using the Pileup command from version 10 of the GCG package (Genetics Computer Group, inc.). This analysis indicated the main branches or phyla reflecting the relationships between sequences. Instead of trying to design primers or probes able to hybridize to all phyla, we designed primers or probes able to hybridize to the main phyla while trying to use the largest phylum possible. This strategy should allow less degenerated primers hence improving sensitivity and by combining primers in a multiplex assay, improve ubiquity. Universal primers SEQ ID NOs. 643-645 based on tuf sequences have been designed to amplify most pathogenic bacteria except Actinomyceteae, Clostridiaceae and the Cytophaga, Flexibacter and Bacteroides phylum (pathogenic bacteria of this phylum include mostly Bacteroides, Porphyromonas and Prevotella species). Primers to fill these gaps have been designed for Actinomyceteae (SEQ ID NOs. 646-648), Clostridiaceae (SEQ ID NOs. 796-797, 808-811), and the Cytophaga, Flexibacter and Bacteroides phylum (SEQ ID NOs. 649-651), also derived from tuf nucleic acids and/or sequences. These primers sets could be used alone or in conjuction to render the universal assay more ubiquitous.

[0118] Universal primers derived from atpD sequences include SEQ ID NOs. 562-565. Combination of these primers does not amplify human DNA but should amplify almost all pathogenic bacterial species except proteobacteria belonging to the epsilon subdivision (Campylobacter and Helicobacter), the bacteria from the Cytophaga, Flexibacter and Bacteroides group and some actinomycetes and corynebacteria. By analysing atpD sequences from the latter species, primers and probes to specifically fill these gaps could be designed and used in conjuction with primers SEQ ID NOs. 562-565, also derived from atpD nucleic acids and/or sequences.

[0119] In addition, universality of the assay could be expanded by mixing atpD sequences-derived primers with tuf sequences-derived primers. Ultimately, even recA sequences-derived primers could be added to fill some gaps in the universal assay.

[0120] It is important to note that the 95 bacterial species selected to test the ubiquity of the universal assay include all of the most clinically relevant bacterial species associated with a variety of human infections acquired in the community or in hospitals (nosocomial infections). The most clinically important bacterial and fungal pathogens are listed in Tables 1 and 2.

Amino Acid Sequences Derived from tuf, atpD and recA Nucleic Acids and/or Sequences

[0121] The amino acid sequences translated from the repertory of tuf, atpD and recA nucleic acids and/or sequences are also an object of the present invention. The amino acid sequence data will be particularly useful for homology modeling of three-dimensional (3D) structure of the elongation factor Tu, elongation factor G, elongation factor 1α, ATPase subunit beta and RecA recombinase. For all these proteins, at least one structure model has been published using X-ray diffraction data from crystals. Based on those structural informations it is possible to use computer software to build 3D model structures for any other protein having peptide sequence homologies with the known structure (Greer, 1991, Methods in Enzymology, 202:239-252; Taylor, 1994, Trends Biotechnol., 12(5):154-158; Sali, 1995, Curr. Opin. Biotechnol. 6:437-451; Sanchez and Sali, 1997, Curr. Opin. Struct. Biol. 7:206-214; Fischer and Eisenberg, 1999, Curr. Opin. Struct. Biol. 9:208-211; Guex et al., 1999, Trends Biochem. Sci. 24: 364-367). Model structures of target proteins are used for the design or to predict the behavior of ligands and inhibitors such as antibiotics. Since EF-Tu and EF-G are already known as antibiotic targets (see above) and since the beta subunit of ATPase and RecA recombinase are essential to the survival of the microbial cells in natural conditions of infection, all four proteins could be considered antibiotic targets. Sequence data, especially the new data generated by us could be very useful to assist the creation of new antibiotic molecules with desired spectrum of activity. In addition, model structures could be used to improve protein function for commercial purposes such as improving antibiotic production by microbial strains or increasing biomass.

[0122] The following detailed embodiments and appended drawings are provided as illustrative examples of his invention, with no intention to limit the scope thereof.

### Examples and Annexes

[0123] For sake of clarity, here is a list of Examples and Annexes:

[0124] Example 1: Sequencing of bacterial atpD (F-type and V-type) gene fragments.

[0125] Example 2: Sequencing of eukaryotic atpD (F-type and V-type) gene fragments.

[0126] Example 3: Sequencing of eukaryotic tuf (EF-1) gene fragments.

[0127] Example 4: Sequencing of eukaryotic tuf (organelle origin, M) gene fragments.

[0128] Example 5: Specific detection and identification of Streptococcus agalactiae using tuf sequences.

[0129] Example 6: Specific detection and identification of Streptococcus agalactiae using atpD sequences.

[0130] Example 7: Development of a PCR assay for detection and identification of staphylococci at genus and species levels.

[0131] Example 8: Differentiating between the two closely related yeast species Candida albicans and Candida dubliniensis.

[0132] Example 9: Specific detection and identification of Entamoeba histolytica.

[0133] Example 10: Sensitive detection and identification of Chlamydia trachomatis.

[0134] Example 11: Genus-specific detection and identification of enterococci.

[0135] Example 12: Detection and identification of the major bacterial platelets contaminants using tuf sequences with a multiplex PCR test.

[0136] Example 13: The resolving power of the tuf and atpD sequences databases is comparable to the biochemical methods for bacterial identification.

[0137] Example 14: Detection of group B streptococci from clinical specimens.

[0138] Example 15: Simultaneous detection and identification of Streptococcus pyogenes and its pyrogenic exotoxin A.

[0139] Example 16: Real-time detection and identification of Shiga toxin-producing bacteria.

[0140] Example 17: Development of a PCR assay for the detection and identification of staphylococci at genus and species levels and its associated mecA gene.

[0141] Example 18: Sequencing of pbp1a, pbp2b and pbp2x genes of Streptoccoccus pneumoniae.

[0142] Example 19: Sequencing of hexA genes of Streptococcus species.

[0143] Example 20: Development of a multiplex PCR assay for the detection of Streptococcus pneumoniae and its penicillin resistance genes.

[0144] Example 21: Sequencing of the vancomycin resistance vanA, vanC1, vanC2 and vanC3 genes.

[0145] Example 22: Development of a PCR assay for the detection and identification of enterococci at genus and species levels and its associated resistance genes vanA and vanB.

[0146] Example 23: Development of a multiplex PCR assay for detection and identification of vancomycin-resistant Enterococcus faecalis, Enterococcus faecium, Enterococcus gallinarum, Enterococcus casseliflavus, and Enterococcus flavescens.

[0147] Example 24: Universal amplification involving the EF-G (fusA) subdivision of tuf sequences.

[0148] Example 25: DNA fragment isolation from Staphylococcus saprophyticus by arbitrarily primed PCR.

[0149] Example 26: Sequencing of prokaryotic tuf gene fragments.

[0150] Example 27: Sequencing of procaryotic recA gene fragments.

[0151] Example 28: Specific detection and identification of Escherichia coli/Shigella sp. using tuf sequences.

[0152] Example 29: Specific detection and identification of Klebsiella pneumoniae using atpD sequences.

[0153] Example 30: Specific detection and identification of Acinetobacter baumanii using tuf sequences.

[0154] Example 31: Specific detection and identification of Neisseria gonorrhoeae using tuf sequences.

[0155] Example 32: Sequencing of bacterial gyrA and parC gene fragments.

[0156] Example 33: Development of a PCR assay for the specific detection and identification of Staphylococcus aureus and its quinolone resistance genes gyrA and parC.

[0157] Example 34: Development of a PCR assay for the detection and identification of Klebsiella pneumoniae and its quinolone resistance genes gyrA and parC.

[0158] Example 35: Development of a PCR assay for the detection and identification of Streptococcus pneumoniae and its quinolone resistance genes gyrA and parC.

[0159] Example 36: Detection of extended-spectrum TEM-type β-lactamases in Escherichia coli.

[0160] Example 37: Detection of extended-spectrum SHV-type β-lactamases in Klebsiella pneumoniae.

[0161] Example 38: Development of a PCR assay for the detection and identification of Neisseria gonorrhoeae and its associated tetracycline resistance gene tetM.

[0162] Example 39: Development of a PCR assay for the detection and identification of Shigella sp. and their associated trimethoprim resistance gene dhfr1a.

[0163] Example 40: Development of a PCR assay for the detection and identification of Acinetobacter baumanii and its associated aminoglycoside resistance gene aph(3′)-VIa.

[0164] Example 41: Specific detection and identification of Bacteroides fragilis using atpD (V-type) sequences.

[0165] Example 42: Evidence for horizontal gene transfer in the evolution of the elongation factor Tu in Enterococci.

[0166] Example 43: Elongation factor Tu (tuf) and the F-ATPase beta-subunit (atpD) as phylogenetic tools for species of the family Enterobacteriaceae.

[0167] Example 44: Testing new pairs of PCR primers selected from two species-specific genomic DNA fragments which are objects of U.S. Pat. No. 6,001,564.

[0168] Example 45: Testing modified versions of PCR primers derived from the sequence of several primers which are objects of U.S. Pat. No. 6,001,564.

[0169] The various Annexes show the strategies used for the selection of a variety of DNA amplification primers, nucleic acid hybridization probes and molecular beacon internal probes:
[0170] (i) Annex I shows the amplification primers used for nucleic acid amplification from tuf sequences.
[0171] (ii) Annex II shows the amplification primers used for nucleic acid amplification from atpD sequences.
[0172] (iii) Annex III shows the internal hybridization probes for detection of tuf sequences.
[0173] (iv) Annex IV illustrates the strategy used for the selection of the amplification primers specific for atpD sequences of the F-type.
[0174] (v) Annex V illustrates the strategy used for the selection of the amplification primers specific for atpD sequences of the V-type.
[0175] (vi) Annex VI illustrates the strategy used for the selection of the amplification primers specific for the tuf sequences of organelle lineage (M, the letter M is used to indicate that in most cases, the organelle is the mitochondria).
[0176] (vii) Annex VII illustrates the strategy used for the selection of the amplification primers specific for the tuf sequences of eukaryotes (EF-1).
[0177] (viii) Annex VII illustrates the strategy for the selection of Streptococcus agalactiae-specific amplification primers from tuf sequences.
[0178] (ix) Annex IX illustrates the strategy for the selection of Streptococcus agalactiae-specific hybridization probes from tuf sequences.
[0179] (x) Annex X illustrates the strategy for the selection of Streptococcus agalactiae-specific amplification primers from atpD sequences.
[0180] (xi) Annex XI illustrates the strategy for the selection from tuf sequences of Candida albicans/dubliniensis-specific amplification primers, Candida albicans-specific hybridization probe and Candida dubliniensis-specific hybridization probe.
[0181] (xii) Annex XII illustrates the strategy for the selection of Staphylococcus-specific amplification primers from tuf sequences.
[0182] (xiii) Annex XIII illustrates the strategy for the selection of the Staphylococcus-specific hybridization probe from tuf sequences.
[0183] (xiv) Annex XIV illustrates the strategy for the selection of Staphylococcus saprophyticus-specific and Staphylococcus haemolyticus-specific hybridization probes from tuf sequences.
[0184] (xv) Annex XV illustrates the strategy for the selection of Staphylococcus aureus-specific and Staphylococcus epidermidis-specific hybridization probes from tuf sequences.
[0185] (xvi) Annex XVI illustrates the strategy for the selection of the Staphylococcus hominis-specific hybridization probe from tuf sequences.
[0186] (xvii) Annex XVII illustrates the strategy for the selection of the Enterococcus-specific amplification primers from tuf sequences.
[0187] (xviii) Annex XVIII illustrates the strategy for the selection of the Enterococcus faecalis-specific hybridization probe, of the Enterococcus faecium-specific hybridization probe and of the Enterococcus casseliflavus-flavescens-gallinarum group-specific hybridization probe from tuf sequences.
[0188] (xix) Annex XIX illustrates the strategy for the selection of primers from tuf sequences for the identification of platelets contaminants.
[0189] (xx) Annex XX illustrates the strategy for the selection of the universal amplification primers from atpD sequences.
[0190] (xxi) Annex XXI shows the amplification primers used for nucleic acid amplification from recA sequences.
[0191] (xxii) Annex XXII shows the specific and ubiquitous primers for nucleic acid amplification from speA sequences.
[0192] (xxiii) Annex XXIII illustrates the first strategy for the selection of Streptococcus pyogenes-specific amplification primers from speA sequences.
[0193] (xxiv) Annex XXIV illustrates the second strategy for the selection of Streptococcus pyogenes-specific amplification primers from speA sequences.
[0194] (xxv) Annex XXV illustrates the strategy for the selection of Streptococcus pyogenes-specific amplification primers from tuf sequences.
[0195] (xxvi) Annex XXVI illustrates the strategy for the selection of stx₁-specific amplification primers and hybridization probe.
[0196] (xxvii) Annex XXVII illustrates the strategy for the selection of stx₂-specific amplification primers and hybridization probe.
[0197] (xxviii) Annex XXVIII illustrates the strategy for the selection of vanA-specific amplification primers from van sequences.
[0198] (xxix) Annex XXIX illustrates the strategy for the selection of vanB-specific amplification primers from van sequences.
[0199] (xxx) Annex XXX illustrates the strategy for the selection of vanC-specific amplification primers from vanC sequences.
[0200] (xxxi) Annex XXXI illustrates the strategy for the selection of Streptococcus pneumoniae-specific amplification primers and hybridization probes from pbp1a sequences.
[0201] (xxxii) Annex XXXII shows the specific and ubiquitous primers for nucleic acid amplification from toxin gene sequences.
[0202] (xxxiii) Annex XXXIII shows the molecular beacon internal hybridization probes for specific detection of toxin sequences.
[0203] (xxxiv) Annex XXXIV shows the specific and ubiquitous primers for nucleic acid amplification from van sequences.
[0204] (xxxv) Annex XXXV shows the internal hybridization probes for specific detection of van sequences.
[0205] (xxxvi) Annex XXXVI shows the specific and ubiquitous primers for nucleic acid amplification from pbp sequences.
[0206] (xxxvii) Annex XXXVII shows the internal hybridization probes for specific detection of pbp sequences.
[0207] (xxxviii) Annex XXXVIII illustrates the strategy for the selection of vanAB-specific amplification primers and vanA- and vanB-specific hybridization probes from van sequences.
[0208] (xxxix) Annex XXXIX shows the internal hybridization probe for specific detection of mecA.
[0209] (xl) Annex XL shows the specific and ubiquitous primers for nucleic acid amplification from hexA sequences.
[0210] (xli) Annex XLI shows the internal hybridization probe for specific detection of hexA.
[0211] (xlii) Annex XLII illustrates the strategy for the selection of Streptococcus pneumoniae species-specific amplification primers and hybridization probe from hexA sequences.
[0212] (xliii) Annex XLIII shows the specific and ubiquitous primers for nucleic acid amplification from pcp sequences.
[0213] (xliv) Annex XLIV shows specific and ubiquitous primers for nucleic acid amplification of S. saprophyticus sequences of unknown coding potential.
[0214] (xlv) Annex XLV shows the molecular beacon internal hybridization probes for specific detection of antimicrobial agents resistance gene sequences.
[0215] (xlvi) Annex XLVI shows the molecular beacon internal hybridization probe for specific detection of S. aureus gene sequences of unknown coding potential.
[0216] (xlvii) Annex XLVII shows the molecular beacon hybridization internal probe for specific detection of tuf sequences.
[0217] (xlviii) Annex XLVIII shows the molecular beacon internal hybridization probes for specific detection of ddl and mtl sequences.
[0218] (xlix) Annex XLIX shows the internal hybridization probe for specific detection of S. aureus sequences of unknown coding potential.
[0219] (l) Annex L shows the amplification primers used for nucleic acid amplification from antimicrobial agents resistance genes sequences.
[0220] (li) Annex LI shows the internal hybridization probes for specific detection of antimicrobial agents resistance genes sequences.
[0221] (lii) Annex LII shows the molecular beacon internal hybridization probes for specific detection of atpD sequences.
[0222] (liii) Annex LIII shows the internal hybridization probes for specific detection of atpD sequences.
[0223] (liv) Annex LIVI shows the internal hybridization probes for specific detection of ddI and mtl sequences.

[0224] As shown in these Annexes, the selected amplification primers may contain inosines and/or base ambiguities. Inosine is a nucleotide analog able to specifically bind to any of the four nucleotides A, C, G or T. Alternatively, degenerated oligonucleotides which consist of an oligonucleotide mix having two or more of the four nucleotides A, C, G or T at the site of mismatches were used. The inclusion of inosine and/or of degeneracies in the amplification primers allows mismatch tolerance thereby permitting the amplification of a wider array of target nucleotide sequences (Dieffenbach and Dveksler, 1995 PCR Primer: A Laboratory Manual, Cold Spring Harbor Laboratory Press, Plainview, N.Y.).

### EXAMPLES

### Example 1

### Sequencing of Bacterial atpD (F-Type and V-Type) Gene Fragments

[0225] As shown in Annex IV, the comparison of publicly available atpD (F-type) sequences from a variety of bacterial species revealed conserved regions allowing the design of PCR primers able to amplify atpD sequences (F-type) from a wide range of bacterial species. Using primers pairs SEQ ID NOs. 566 and 567, 566 and 814, 568 and 567, 570 and 567, 572 and 567, 569 and 567, 571 and 567, 700 and 567, it was possible to amplify and sequence atpD sequences SEQ ID NOs. 242-270, 272-398, 673-674, 737-767, 866-867, 942-955, 1245-1254, 1256-1265, 1527, 1576, 1577, 1600-1604, 1640-1646, 1649, 1652, 1655, 1657, 1659-1660, 1671, 1844-1845, and 1849-1865.

[0226] Similarly, Annex V shows the strategy to design the PCR primers able to amplify atpD sequences of the V-type from a wide range of archaeal and bacterial species. Using primers SEQ ID NOs. 681-683, it was possible to amplify and sequence atpD sequences SEQ ID NOs. 827-832, 929-931, 958 and 966. As the gene was difficult to amplify for several species, additional amplification primers were designed inside the original amplicon (SEQ ID NOs. 1203-1207) in order to obtain sequence information for these species. Other primers (SEQ ID NO. 1212, 1213, 2282-2285) were also designed to amplify regions of the atpD gene (V-type) in archaebacteria.

### Example 2

### Sequencing of Eukaryotic atpD (F-Type and V-Type) Gene Fragments

[0227] The comparison of publicly available atpD (F-type) sequences from a variety of fungal and parasitical species revealed conserved regions allowing the design of PCR primers able to amplify atpD sequences from a wide range of fungal and parasitical species. Using primers pairs SEQ ID NOs. 568 and 573, 574 and 573, 574 and 708, and 566 and 567, it was possible to amplify and sequence atpD sequences SEQ ID NOs. 458-497, 530-538, 663, 667, 676, 678-680, 768-778, 856-862, 889-896, 941, 1638-1639, 1647, 1650-1651, 1653-1654, 1656, 1658, 1684, 1846-1848, and 2189-2192.

[0228] In the same manner, the primers described in Annex V (SEQ ID NOs. 681-683) could amplify the atpD (V-type) gene from various fungal and parasitical species. This strategy allowed to obtain SEQ ID NOs. 834-839, 956-957, and 959-965.

### Example 3

### Sequencing of Eukaryotic tuf (EF-1) Gene Fragments

[0229] As shown in Annex VII, the comparison of publicly available tuf (EF-1) sequences from a variety of fungal and parasitical species revealed conserved regions allowing the design of PCR primers able to amplify tuf sequences from a wide range of fungal and parasitical species. Using primers pairs SEQ ID NOs. 558 and 559, 813 and 559, 558 and 815, 560 and 559, 653 and 559, 558 and 655, and 654 and 559, 1999 and 2000, 2001 and 2003, 2002 and 2003, it was possible to amplify and sequence tuf sequences SEQ ID NOs. 399-457, 509-529, 622-624, 677, 779-790, 840-842, 865, 897-903, 1266-1287, 1561-1571 and 1685.

### Example 4

### Sequencing of Eukaryotic tuf (Organelle Origin, M) Gene Fragments

[0230] As shown in Annex VI, the comparison of publicly available tuf (organelle origin, M) sequences from a variety of fungal and parasitical organelles revealed conserved regions allowing the design of PCR primers able to amplify tuf sequences of several organelles belonging to a wide range fungal and parasitical species. Using primers pairs SEQ ID NOs. 664 and 652, 664 and 561, 911 and 914, 912 and 914, 913 and 915, 916 and 561, 664 and 917, it was possible to amplify and sequence tuf sequences SEQ ID NOs. 498-508, 791-792, 843-855, 904-910, 1664, 1666-1667, 1669-1670, 1673-1683, 1686-1689, 1874-1876, 1879, 1956-1960, and 2193-2199.

### Example 5

### Specific Detection and Identification of Streptococcus agalactiae Using tuf Sequences

[0231] As shown in Annex VIII, the comparison of tuf sequences from a variety of bacterial species allowed the selection of PCR primers specific for S. agalactiae. The strategy used to design the PCR primers was based on the analysis of a multiple sequence alignment of various tuf sequences. The multiple sequence alignment includes the tuf sequences of four bacterial strains from the target species as well as tuf sequences from other species and bacterial genera, especially representatives of closely related species. A careful analysis of this alignment allowed the selection of oligonucleotide sequences which are conserved within the target species but which discriminate sequences from other species and genera, especially from the closely related species, thereby permitting the species-specific, ubiquitous and sensitive detection and identification of the target bacterial species.

[0232] The chosen primer pair, oligos SEQ ID NO. 549 and SEQ ID NO. 550, gives an amplification product of 252 bp. Standard PCR was carried out using 0.4 μM of each primer, 2.5 mM MgCl₂, BSA 0.05 mM, 1×Taq Buffer (Promega), dNTP 0.2 mM (Pharmacia), 0.5 U Taq DNA polymerase (Promega) coupled with TaqStart™ antibody (Clontech Laboratories Inc., Palo Alto), 1 μl of genomic DNA sample in a final volume of 20 μl using a PTC-200 thermocycler (MJ Research Inc.). The optimal cycling conditions for maximum sensitivity and specificity were 3 minutes at 95° C. for initial denaturation, then forty cycles of two steps consisting of 1 second at 95° C. and 30 seconds at 62° C., followed by terminal extension at 72° C. for 2 minutes. Detection of the PCR products was made by electrophoresis in agarose gels (2%) containing 0.25 μg/ml of ethidium bromide.

[0233] Specificity of the assay was tested by adding into the PCR reactions, 0.1 ng of genomic DNA from each of the bacterial species listed in Table 8. Efficient amplification was observed only for the 5 S. agalactiae strains listed. Of the other bacterial species, including 32 species representative of the vaginal flora and 27 other streptococcal species, only S. acidominimus yielded amplification. The signal with 0.1 ng of S. acidominimus genomic DNA was weak and the detection limit for this species was 10 pg (corresponding to more than 4000 genome copies) while the detection limit for S. agalactiae was 2.5 fg (corresponding to one genome copy) of genomic DNA.

[0234] To increase the specificity of the assay, internal probes were designed for FRET (Fluorescence Resonance Energy Transfer) detection using the LightCycler™ (Idaho Technology). As illustrated in Annex IX, a multiple sequence alignment of streptococcal tuf sequence fragments corresponding to the 252 bp region amplified by primers SEQ ID NO. 549 and SEQ ID NO. 550, was used for the design of internal probes TSagHF436 (SEQ ID NO. 582) and TSagHF465 (SEQ ID NO. 583). The region of the amplicon selected for internal probes contained sequences unique and specific to S. agalactiae. SEQ ID NO. 583, the more specific probe, is labelled with fluorescein in 3′, while SEQ ID NO. 582, the less discriminant probe, is labelled with CY5 in 5′ and blocked in 3′ with a phosphate group. However, since the FRET signal is only emitted if both probes are adjacently hybridized on the same target amplicon, detection is highly specific.

[0235] Real-time detection of PCR products using the LightCycler™ was carried out using 0.4 μM of each primer (SEQ ID NO. 549-550), 0.2 μM of each probe (SEQ ID NO. 582-583), 2.5 mM MgCl₂, BSA 450 μg/ml, 1×PC2 Buffer (AB Peptides, St-Louis, Mo.), dNTP 0.2 mM (Pharmacia), 0.5 U KlenTaq1™ DNA polymerase (AB Peptides) coupled with TaqStart™ antibody (Clontech Laboratories Inc., Palo Alto), 0.7 μl of genomic DNA sample in a final volume of 7 μl using a LightCycler thermocycler (Idaho Technology). The optimal cycling conditions for maximum sensitivity and specificity were 3 minutes at 94° C. for initial denaturation, then forty cycles of three steps consisting of 0 second (this setting meaning the LightCycler will reach the target temperature and stay at it for its minimal amount of time) at 94° C., 10 seconds at 64° C., 20 seconds at 72° C. Amplification was monitored during each annealing steps using the fluorescence ratio. The streptococcal species having close sequence homologies with the tuf sequence of S. agalactiae (S. acidominimus, S. anginosus, S. bovis, S. dysgalactiae, S. equi, S. ferns, S. gordonii, S. intermedius, S. parasanguis, S. parauberis, S. salivarius, S. sanguis, S. suis) as well as S. agalactiae were tested in the LightCycler with 0.07 ng of genomic DNA per reaction. Only S. agalactiae yielded an amplification signal, hence demonstrating that the assay is species-specific. With the LightCycler™ assay using the internal FRET probes, the detection limit for S. agalactiae was 1-2 genome copies of genomic DNA.

### Example 6

### Specific Detection and Identification of Streptococcus agalactiae Using atpD Sequences

[0236] As shown in Annex X, the comparison of atpD sequences from a variety of bacterial species allowed the selection of PCR primers specific for S. agalactiae. The primer design strategy is similar to the strategy described in the preceding Example except that atpD sequences were used in the alignment.

[0237] Four primers were selected, ASag42 (SEQ ID NO. 627), ASag52 (SEQ ID NO. 628), ASag206 (SEQ ID NO. 625) and ASag371 (SEQ ID NO. 626). The following combinations of these four primers give four amplicons; SEQ ID NO. 627+SEQ ID NO. 625=190 bp, SEQ ID NO. 628+SEQ ID NO. 625=180 bp, SEQ ID NO. 627+SEQ ID NO. 626=355 bp, and SEQ ID NO. 628+SEQ ID NO. 626=345 bp.

[0238] Standard PCR was carried out on PTC-200 thermocyclers (MJ Research Inc) using 0.4 μM of each primers pair, 2.5 mM MgCl₂, BSA 0.05 mM, 1×taq Buffer (Promega), dNTP 0.2 mM (Pharmacia), 0.5 U Taq DNA polymerase (Promega) coupled with TaqStart™ antibody (Clontech Laboratories Inc., Palo Alto), 1 μl of genomic DNA sample in a final volume of 20 μL. The optimal cycling conditions for maximum sensitivity and specificity were adjusted for each primer pair. Three minutes at 95° C. for initial denaturation, then forty cycles of two steps consisting of 1 second at 95° C. and 30 seconds at the optimal annealing temperature specified below were followed by terminal extension at 72° C. for 2 minutes. Detection of the PCR products was made by electrophoresis in agarose gels (2%) containing 0.25 μg/ml of ethidium bromide. Since atpD sequences are relatively more specific than tuf sequences, only the most closely related species namely, the steptococcal species listed in Table 9, were tested.

[0239] All four primer pairs only amplified the six S. agalactiae strains. With an annealing temperature of 63° C., the primer pair SEQ ID NO. 627+SEQ ID NO. 625 had a sensitivity of 1-5 fg (equivalent to 1-2 genome copies). At 55° C., the primer pair SEQ ID NO. 628+SEQ ID NO. 625 had a sensitivity of 2.5 fg (equivalent to 1 genome copy). At 60° C., the primer pair SEQ ID NO. 627+SEQ ID NO. 626 had a sensitivity of 10 fg (equivalent to 4 genome copies). At 58° C., the primer pair SEQ ID NO. 628+SEQ ID NO. 626 had a sensitivity of 2.5-5 fg (equivalent to 1-2 genome copies). This proves that all four primer pairs can detect S. agalactiae with high specificity and sensitivity. Together with Example 5, this example demonstrates that both tuf and atpD sequences are suitable and flexible targets for the identification of microorganisms at the species level. The fact that 4 different primer pairs based on atpD sequences led to efficient and specific amplification of S. agalactiae demonstrates that the challenge is to find target genes suitable for diagnostic purposes, rather than finding primer pairs from these target sequences.

### Example 7

### Development of a PCR Assay for Detection and Identification of Staphylococci at Genus and Species Levels

### Materials and Methods

[0240] Bacterial strains. The specificity of the PCR assay was verified by using a panel of ATCC (America Type Culture Collection) and DSMZ (Deutsche Sammlung von Mikroorganismen und Zellkulturen GmbH; German Collection of Microorganisms and Cell Cultures) reference strains consisting of 33 gram-negative and 47 gram-positive bacterial species (Table 12). In addition, 295 clinical isolates representing 11 different species of staphylococci from the microbiology laboratory of the Centre Hospitalier Universitaire de Quebec, Pavillon Centre Hospitalier de l'Université Laval (CHUL) (Step-Foy, Quebec, Canada) were also tested to further validate the Staphylococcus-specific PCR assay. These strains were all identified by using (i) conventional methods or (ii) the automated MicroScan Autoscan-4 system equipped with the Positive BP Combo Panel Type 6 (Dade Diagnostics, Mississauga, Ontario, Canada). Bacterial strains from frozen stocks kept at −80° C. in brain heart infusion (BHI) broth containing 10% glycerol were cultured on sheep blood agar or in BHI broth (Quelab Laboratories Inc, Montreal, Quebec, Canada).

[0241] PCR primers and internal probes. Based on multiple sequence alignments, regions of the tuf gene unique to staphylococci were identified. Staphylococcus-specific PCR primers TStaG422 (SEQ ID NO. 553) and TStaG765 (SEQ ID NO. 575) were derived from these regions (Annex XII). These PCR primers are displaced by two nucleotide positions compared to original Staphylococcus-specific PCR primers described in our patent publication WO98/20157 (SEQ ID NOs. 17 and 20 in the said patent publication). These modifications were done to ensure specificity and ubiquity of the primer pair, in the light of new tuf sequence data revealed in the present patent application for several additional staphylococcal species and strains.

[0242] Similarly, sequence alignment analysis were performed to design genus and species-specific internal probes (see Annexes XIII to XVI). Two internal probes specific for Staphylococcus (SEQ ID NOs. 605-606), five specific for S. aureus (SEQ ID NOs. 584-588), five specific for S. epidermidis (SEQ ID NO. 589-593), two specific for S. haemolyticus (SEQ ID NOs. 594-595), three specific for S. hominis (SEQ ID NOs. 596-598), four specific for S. saprophyticus (SEQ ID NOs. 599-601 and 695), and two specific for coagulase-negative Staphylococcus species including S. epidermidis, S. hominis, S. saprophyticus, S. auricularis, S. capitis, S. haemolyticus, S. lugdunensis, S. simulans, S. cohnii and S. warneri (SEQ ID NOs. 1175-1176) were designed. The range of mismatches between the Staphylococcus-specific 371-bp amplicon and each of the 20-mer species-specific internal probes was from 1 to 5, in the middle of the probe when possible. No mismatches were present in the two Staphylococcus-specific probes for the 11 species analyzed: S. aureus, S. auricularis, S. capitis, S. cohnii, S. epidermidis, S. haemolyticus, S. hominis, S. lugdunensis, S. saprophyticus, S. simulans and S. warneri. In order to verify the intra-specific sequence conservation of the nucleotide sequence, sequences were obtained for the 371-bp amplicon from five unrelated ATCC and clinical strains for each of the species S. aureus, S. epidermidis, S. haemolyticus, S. hominis and S. saprophyticus. The Oligo™ (version 5.0) primer analysis software (National Biosciences, Plymouth, Minn.) was used to confirm the absence of self-complementary regions within and between the primers or probes. When required, the primers contained inosines or degenerated nucleotides at one or more variable positions. Oligonucleotide primers and probes were synthesized on a model 394 DNA synthesizer (Applied Biosystems, Mississauga, Ontario, Canada). Detection of the hybridization was performed with the DIG-labeled dUTP incorporated during amplification with the Staphylococcus-specific PCR assay, and the hybridization signal was detected with a luminometer (Dynex Technologies) as described above in the section on luminescent detection of amplification products. Annexes XIII to XVI illustrate the strategy for the selection of several internal probes.

[0243] PCR amplification. For all bacterial species, amplification was performed from purified genomic DNA or from a bacterial suspension whose turbidity was adjusted to that of a 0.5 McFarland standard, which corresponds to approximately 1.5×10⁸ bacteria per ml. One nanogram of genomic DNA or 1 □l of the standardized bacterial suspension was transferred directly to a 19 □l PCR mixture. Each PCR reaction contained 50 mM KCl, 10 mM Tris-HCl (pH 9.0), 0.1% Triton X-100, 2.5 mM MgCl₂, 0.2 □M (each) of the two Staphylococcus genus-specific primers (SEQ ID NOs. 553 and 575), 200 □M (each) of the four deoxynucleoside triphosphates (Pharmacia Biotech), 3.3 □g/□l bovine serum albumin (BSA) (Sigma-Aldrich Canada Ltd, Oakville, Ontario, Canada), and 0.5 U Taq polymerase (Promega) coupled with TaqStart™ Antibody (Clontech). The PCR amplification was performed as follows: 3 min. at 94° C. for initial denaturation, then forty cycles of two steps consisting of 1 second at 95° C. and 30 seconds at 55° C., plus a terminal extension at 72° C. for 2 minutes. Detection of the PCR products was made by electrophoresis in agarose gels (2%) containing 0.25 μg/ml of ethidium bromide. Visualization of the PCR products was made under UV at 254 nm.

[0244] For determination of the sensitivities of the PCR assays, two-fold dilutions of purified genomic DNA were used to determine the minimal number of genome copies which can be detected.

### Results

[0245] Amplifications with the Staphylococcus genus-specific PCR assay. The specificity of the assay was assessed by performing 30-cycle and 40-cycle PCR amplifications with the panel of gram-positive (47 species from 8 genera) and gram-negative (33 species from 22 genera) bacterial species listed in Table 12. The PCR assay was able to detect efficiently 27 of 27 staphylococcal species tested in both 30-cycle and 40-cycle regimens. For 30-cycle PCR, all bacterial species tested other than staphylococci were negative. For 40-cycle PCR, Enterococcus faecalis and Macrococcus caseolyticus were slightly positive for the Staphylococcus-specific PCR assay. The other species tested remained negative. Ubiquity tests performed on a collection of 295 clinical isolates provided by the microbiology laboratory of the Centre Hospitalier Universitaire de Quebec, Pavillon Centre Hospitalier de l'Université Laval (CHUL), including Staphylococcus aureus (n=34), S. auricularis (n=2), S. capitis (n=19), S. cohnii (n=5), S. epidermidis (n=18), S. haemolyticus (n=21), S. hominis (n=73), S. lugdunensis (n=17), S. saprophyticus (n=6), S. simulans (n=3), S. warneri (n=32) and Staphylococcus sp. (n=65), showed a uniform amplification signal with the 30-cycle PCR assays and a perfect relation between the genotype and classical identification schemes.

[0246] The sensitivity of the Staphylococcus-specific assay with 30-cycle and 40-cycle PCR protocols was determined by using purified genomic DNA from the 11 staphylococcal species previously mentioned. For PCR with 30 cycles, a detection limit of 50 copies of genomic DNA was consistently obtained. In order to enhance the sensitivity of the assay, the number of cycles was increased. For 40-cycle PCR assays, the detection limit was lowered to a range of 5-10 genome copies, depending on the staphylococcal species tested.

[0247] Hybridization between the Staphylococcus-specific 371-bp amplicon and species-specific or genus-specific internal probes. Inter-species polymorphism was sufficient to generate species-specific internal probes for each of the principal species involved in human diseases (S. aureus, S. epidermidis, S. haemolyticus, S. hominis and S. saprophyticus). In order to verify the intra-species sequence conservation of the nucleotide sequence, sequence comparisons were performed on the 371-bp amplicon from five unrelated ATCC and clinical strains for each of the 5 principal staphylococcal species: S. aureus, S. epidermidis, S. haemolyticus, S. hominis and S. saprophyticus. Results showed a high level of conservation of nucleotide sequence between different unrelated strains from the same species. This sequence information allowed the development of staphylococcal species identification assays using species-specific internal probes hybridizing to the 371-bp amplicon. These assays are specific and ubiquitous for those five staphylococcal species. In addition to the species-specific internal probes, the genus-specific internals probes were able to recognize all or most Staphylococcus species tested.

### Example 8

### Differentiating Between the Two Closely Related Yeast Species Candida albicans and Candida dubliniensis

[0248] It is often useful for the clinician to be able to differentiate between two very closely related species of microorganisms. Candida albicans is the most important cause of invasive human mycose. In recent years, a very closely related species, Candida dubliniensis, was isolated in immunosuppressed patients. These two species are difficult to distinguish by classic biochemical methods. This example demonstrates the use of tuf sequences to differentiate Candida albicans and Candida dubliniensis. PCR primers SEQ ID NOs. 11-12, from previous patent publication WO98/20157, were selected for their ability to specifically amplify a tuf (elongation factor 1 alpha type) fragment from both species (see Annex XI for primer positions). Within this tuf fragment, a region differentiating C. albicans and C. dubliniensis by two nucleotides was selected and used to design two internal probes (see Annex XI for probe design, SEQ ID NOs. 577 and 578) specific for each species. Amplification of genomic DNA from C. albicans and C. dubliniensis was carried out using DIG-11-dUTP as described above in the section on chemiluminescent detection of amplification products. Internal probes SEQ ID NOs. 577 and 578 were immobilized on the bottom of individual microtiter plates and hybridization was carried out as described above in the above section on chemiluminescent detection of amplification products. Luminometer data showed that the amplicon from C. albicans hybridized only to probe SEQ ID NO. 577 while the amplicon from C. dubliniensis hybridized only to probe SEQ ID NO. 578, thereby demonstrating that each probe was species-specific.

### Example 9

### Specific Identification of Entamoeba histolytica

[0249] Upon analysis of tuf (elongation factor 1 alpha) sequence data, it was possible to find four regions where Entamoeba histolytica sequences remained conserved while other parasitical and eukaryotic species have diverged. Primers TEntG38 (SEQ ID NO. 703), TEntG442 (SEQ ID NO. 704), TEntG534 (SEQ ID NO. 705), and TEntG768 (SEQ ID NO. 706) were designed so that SEQ ID NO. 703 could be paired with the three other primers. On PTC-200 thermocyclers (MJ Research), the cycling conditions for initial sensitivity and specificity testing were 3 min. at 94° C. for initial denaturation, then forty cycles of two steps consisting of 1 second at 95° C. and 30 seconds at 55° C., followed by terminal extension at 72° C. for 2 minutes. Detection of the PCR products was made by electrophoresis in agarose gels (2%) containing 0.25 μg/ml of ethidium bromide. The three primer pairs could detect the equivalent of less than 200 E. histolytica genome copies. Specificity was tested using 0.5 ng of purified genomic DNA from a panel of microorganisms including Babesia bovis, Babesia microtti, Candida albicans, Crithidia fasciculata, Leishmania major, Leishmania hertigi and Neospora caninum. Only E. histolytica DNA could be amplified, thereby suggesting that the assay was species-specific.

### Example 10

### Sensitive Identification of Chlamydia trachomatis

[0250] Upon analysis of tuf sequence data, it was possible to find two regions where Chlamydia trachomatis sequences remained conserved while other species have diverged. Primers Ctr82 (SEQ ID NO. 554) and Ctr249 (SEQ ID NO. 555) were designed. With the PTC-200 thermocyclers (MJ Research), the optimal cycling conditions for maximum sensitivity and specificity were determined to be 3 min. at 94° C. for initial denaturation, then forty cycles of two steps consisting of 1 second at 95° C. and 30 seconds at 60° C., followed by terminal extension at 72° C. for 2 minutes. Detection of the PCR products was made by electrophoresis in agarose gels (2%) containing 0.25 μg/ml of ethidium bromide. The assay could detect the equivalent of 8 C. trachomatis genome copies. Specificity was tested with 0.1 ng of purified genomic DNA from a panel of microorganisms including 22 species commonly encountered in the vaginal flora (Bacillus subtilis, Bacteroides fragilis, Candida albicans, Clostridium difficile, Corynebacterium cervicis, Corynebacterium urealyticum, Enterococcus faecalis, Enterococcus faecium, Escherichia coli, Fusobacterium nucleatum, Gardnerella vaginalis, Haemophilus influenzae, Klebsiella oxytoca, Lactobacillus acidophilus, Peptococcus niger, Peptostreptococcus prevotii, Porphyromonas asaccharolytica, Prevotella melaminogenica, Propionibacterium acnes, Staphylococcus aureus, Streptococcus acidominimus, and Streptococcus agalactiae). Only C. trachomatis DNA could be amplified, thereby suggesting that the assay was species-specific.

### Example 11

### Genus-Specific Detection and Identification of Enterococci

[0251] Upon analysis of tuf sequence data and comparison with the repertory of tuf sequences, it was possible to find two regions where Enterococcus sequences remained conserved while other genera have diverged (Annex XVII). Primer pair Encg313dF and Encg599c (SEQ ID NOs. 1137 and 1136) was tested for its specificity by using purified genomic DNA from a panel of bacteria listed in Table 10. Using the PTC-200 thermocycler (MJ Research), the optimal cycling conditions for maximum sensitivity and specificity were determined to be 3 min. at 94° C. for initial denaturation, then forty cycles of two steps consisting of 1 second at 95° C. and 30 seconds at 55° C., followed by terminal extension at 72° C. for 2 minutes. Detection of the PCR products was made by electrophoresis in agarose gels (2%) containing 0.25 μg/ml of ethidium bromide. Visualization of the PCR products was made under UV at 254 nm. The 18 enterococcal species listed in Table 10 were all amplified efficiently. The only other species amplified were Abiotrophia adiacens, Gemella haemolysans and Gemella morbillorum, three gram-positive species. Sensitivity tested with several strains of E. casseliflavus, E. faecium, E. faecalis, E. flavescens and E. gallinarum and with one strain of each other Enterococcus species listed in Table 10 ranged from 1 to 10 copies of genomic DNA. The sequence variation within the 308-bp amplicon was sufficient so that internal probes could be used to speciate the amplicon and differenciate enterococci from Abiotrophia adiacens, Gemella haemolysans and Gemella morbillorum, thereby allowing to achieve excellent specificity. Species-specific internal probes were generated for each of the clinically important species, E. faecalis (SEQ ID NO. 1174), E. faecium (SEQ ID NO. 602), and the group including E. casseliflavus, E. flavescens and E. gallinarum (SEQ ID NO. 1122) (Annex XVIII). The species-specific internal probes were able to differentiate their respective Enterococcus species from all other Enterococcus species. These assays are sensitive, specific and ubiquitous for those five Enterococcus species.

### Example 12

### Identification of the Major Bacterial Platelets Contaminants Using tuf Sequences with a Multiplex PCR Test

[0252] Blood platelets preparations need to be monitored for bacterial contaminations. The tuf sequences of 17 important bacterial contaminants of platelets were aligned. As shown in Annex XIX, analysis of these sequences allowed the design of PCR primers. Since in the case of contamination of platelet concentrates, detecting all species (not just the more frequently encountered ones) is desirable, perfect specificity of primers was not an issue in the design. However, sensitivity is important. That is why, to avoid having to put too much degeneracy, only the most frequent contaminants were included in primer design, knowing that the selected primers would anyway be able to amplify more species than the 17 used in the design because they target highly conserved regions of tuf sequences. Oligonucleotide sequences which are conserved in these 17 major bacterial contaminants of platelet concentrates were chosen (oligos Tplaq 769 and Tplaq 991, respectively SEQ ID NOs. 636 and 637) thereby permitting the detection of these bacterial species. However, sensitivity was slightly deficient with staphylococci. To ensure maximal sensitivity in the detection of all the more frequent bacterial contaminants, a multiplex assay also including oligonucleotide primers targetting the Staphylococcus genera (oligos Stag 422, SEQ ID NO. 553; and Stag 765, SEQ ID NO. 575) was developed. The bacterial species detected with the assay are listed in Table 14.

[0253] The primer pairs, oligos SEQ ID NO. 636 and SEQ ID NO. 637 that give an amplification product of 245 pb, and oligos SEQ ID NO. 553 and SEQ ID NO. 575 that give an amplification product of 368 pb, were used simultaneously in the multiplex PCR assay. Detection of these PCR products was made on the LightCycler thermocycler (Idaho Technology) using SYBR® Green I (Molecular Probe Inc.). SYBR® Green I is a fluorescent dye that binds specifically to double-stranded DNA.

[0254] Fluorogenic detection of PCR products with the LightCycler was carried out using 1.0 μM of both Tplaq primers (SEQ ID NOs. 636-637) and 0.4 μM of both TStaG primers (SEQ ID NOs. 553 and 575), 2.5 mM MgCl₂, BSA 7.5 μM, dNTP 0.2 mM (Pharmacia), 10 mM Tris-HCl (pH 8.3), 50 mM KCl, 0.5 U Taq DNA polymerase (Boerhinger Mannheim) coupled with TaqStart™ antibody (Clontech), and 0.07 ng of genomic DNA sample in a final volume of 7 μl. The optimal cycling conditions for maximum sensitivity and specificity were 1 minute at 94° C. for initial denaturation, then forty-five cycles of three steps consisting of 0 second at 95° C., 5 seconds at 60° C. and 9 seconds at 72° C. Amplification was monitored during each elongation cycle by measuring the level of SYBR® Green I. However, real analysis takes place after PCR. Melting curves are done for each sample and transformation of the melting peak allows determination of Tm. Thus primer-dimer and specific PCR product are discriminated. With this assay, all prominent bacterial contaminants of platelet concentrates listed in Annex XIX and Table 14 were detected. Sensitivity tests were performed on the 9 most frequent bacterial contaminants of platelets. The detection limit was less than 20 genome copies for E. cloacae, B. cereus, S. choleraesuis and S. marcescens; less than 15 genome copies for P. aeruginosa; and 2 to 3 copies were detected for S. aureus, S. epidermidis, E. coli and K. pneumoniae. Further refinements of assay conditions should increase sensitivity levels.

### Example 13

### The Resolving Power of the tuf and atpD Sequences DataBases is Comparable to the Biochemical Methods for Bacterial Identification

[0255] The present gold standard for bacterial identification is mainly based on key morphological traits and batteries of biochemical tests. Here we demonstrate that the use of tuf and atpD sequences combined with simple phylogenetic analysis of databases formed by these sequences is comparable to the gold standard. In the process of acquiring data for the tuf sequences, we sequenced the tuf gene of a strain that was given to us labelled as Staphylococcus hominis ATCC 35982. That tuf sequence (SEQ ID NO. 192) was incorporated into the tuf sequences database and subjected to a basic phylogenic analysis using the Pileup command from version 10 of the GCG package (Genetics Computer Group). This analysis indicated that SEQ ID NO. 192 is not associated with other S. hominis strains but rather with the S. warneri strains. The ATCC 35982 strain was sent to the reference laboratory of the Laboratoire de santé publique du Québec (LSPQ). They used the classic identification scheme for staphylococci (Kloos and Schleifer, 1975, J. Clin. Microbiol. 1:82-88). Their results shown that although the colonial morphology could correspond to S. hominis, the more precise biochemical assays did not. These assays included discriminant mannitol, mannose and ribose acidification tests as well as rapid and dense growth in deep thioglycolate agar. The LSPQ report identified strain ATCC 35982 as S. warneri which confirms our database analysis. The same thing happened for S. warneri (SEQ ID NO. 187) which had initially been identified as S. haemolyticus by a routine clinical laboratory using a low resolving power automated system (MicroScan, AutoScan-4™). Again, the tuf and LSPQ analysis agreed on its identification as S. warneri. In numerous other instances, in the course of acquiring tuf and atpD sequence data from various species and genera, analysis of our tuf and/or atpD sequence databases permitted the exact identification of mislabelled or erroneously identified strains. These results clearly demonstrate the usefulness and the high resolving power of our sequence-based identification assays using the tuf and atpD sequences databases.

### Example 14

### Detection of Group B Streptococci from Clinical Specimens*

### Introduction

[0256] Streptococcus agalactiae, the group B streptococcus (GBS), is responsible for a severe illness affecting neonate infants. The bacterium is passed from the healthy carrier mother to the baby during delivery. To prevent this infection, it is recommended to treat expectant mothers susceptible of carrying GBS in their vaginal/anal flora. Carrier status is often a transient condition and rigorous monitoring requires cultures and classic bacterial identification weeks before delivery. To improve the detection and identification of GBS we developed a rapid, specific and sensitive PCR test fast enough to be performed right at delivery.

### Materials and Methods

[0257] GBS clinical specimens. A total of 66 duplicate vaginal/anal swabs were collected from 41 consenting pregnant women admitted for delivery at the Centre Hospitalier Universitaire de Quebec, Pavillon Saint-François d'Assise following the CDC recommendations. The samples were obtained either before or after rupture of membranes. The swab samples were tested at the Centre de Recherche en Infectiologie de l'Université Laval within 24 hours of collection. Upon receipt, one swab was cut and then the tip of the swab was added to GNS selective broth for identification of group B streptococci (GBS) by the standard culture methods recommended by the CDC. The other swab was processed following the instruction of the IDI DNA extraction kit (Infectio Diagnostics (IDI) Inc.) prior to PCR amplification.

[0258] Oligonucleotides. PCR primers, Tsag340 (SEQ ID NO. 549) and Tsag552 (SEQ ID NO. 550) complementary to the regions of the tuf gene unique for GBS were designed based upon a multiple sequence alignment using our repertory of tuf sequences. Oligo primer analysis software (version 5.0) (National Biosciences) was used to analyse primers annealing temperature, secondary structure potential as well as mispriming and dimerization potential. The primers were synthesized using a model 391 DNA synthesizer (Applied Biosystems).

[0259] A pair of fluorescently labeled adjacent hybridization probes Sag465-F (SEQ ID NO. 583) and Sag436-C (SEQ ID NO. 582) were synthesized and purified by Operon Technologies. They were designed to meet the recommendations of the manufacturer (Idaho Technology) and based upon multiple sequence alignment analysis using our repertory of tuf sequences to be specific and ubiquitous for GBS. These adjacent probes, which are separated by one nucleotide, allow fluorescence resonance energy transfer (FRET), generating an increased fluorescence signal when both hybridized simultaneously to their target sequences. The probe SEQ ID NO. 583 was labeled with FITC in 3 prime while SEQ ID NO. 582 was labeled with Cy5 in 5 prime. The Cy5-labeled probes contained a 3′-blocking phosphate group to prevent extension of the probes during the PCR reactions.

[0260] PCR amplification. Conventional amplifications were performed either from 2 μl of a purified genomic DNA preparation or cell lysates of vaginal/anal specimens. The 20 μl PCR mixture contained 0.4 μM of each GBS-specific primer (SEQ ID NOs. 549-550), 200 μM of each deoxyribonucleotide (Pharmacia Biotech), 10 mM Tris-HCl (pH 9.0), 50 mM KCl, 0.1% Triton X-100, 2.5 mM MgCl₂, 3.3 mg/ml bovine serum albumin (BSA) (Sigma), and 0.5 U of Taq polymerase (Promega) combined with the TaqStart™ antibody (Clontech). The TaqStart™ antibody, which is a neutralizing monoclonal antibody of Taq DNA polymerase, was added to all PCR reactions to enhance the efficiency of the amplification. The PCR mixtures were subjected to thermal cycling (3 min at 95° C. and then 40 cycles of 1 s at 95° C., and 30 s at 62° C. with a 2-min final extension at 72° C.) with a PTC-200 DNA Engine thermocycler (MJ research). The PCR-amplified reaction mixture was resolved by agarose gel electrophoresis.

[0261] The LightCycler™ PCR amplifications were performed with 1 μl of a purified genomic DNA preparation or cell lysates of vaginal/anal specimens. The 10 μl amplification mixture consisted of 0.4 μM each GBS-specific primer (SEQ ID NOs. 549-550), 200 μM each dNTP, 0.2 μM each fluorescently labeled probe (SEQ ID NOs. 582-583), 300 μg/ml BSA (Sigma), and 1 μl of 10×PC2 buffer (containing 50 mM Tris-HCl (pH 9.1), 16 mM ammonium sulfate, 3.5 mM Mg²⁺, and 150 μg/ml BSA) and 0.5 U KlenTaq1™ (AB Peptides) coupled with TaqStart™ antibody (Clontech). KlenTaq1™ is a highly active and more heat-stable DNA polymerase without 5′-exonuclease activity. This prevents hydrolysis of hybridized probes by the 5′ to 3′ exonuclease activity. A volume of 7 μl of the PCR mixture was transferred into a composite capillary tube (Idaho Technology). The tubes were then centrifuged to move the reaction mixture to the tips of the capillaries and then cleaned with optical-grade methanol. Subsequently the capillaries were loaded into the carousel of a LC32 LightCycler™ (Idaho Technology), an instrument that combines rapid-cycle PCR with fluorescence analysis for continuous monitoring during amplification. The PCR reaction mixtures were subjected to a denaturation step at 94° C. for 3 min followed by 45 cycles of 0 s at 94° C., 20 s at 64° C. and 10 s at 72° C. with a temperature transition rate of 20° C./s. Fluorescence signals were obtained at each cycle by sequentially positioning each capillary on the carousel at the focus of optical elements affiliated to the built-in fluorimeter for 100 milliseconds. Complete amplification and analysis required about 35 min.

[0262] Specificity and sensitivity tests. The specificity of the conventional and LightCycler™ PCR assays was verified by using purified genomic DNA (0.1 ng/reaction) from a battery of ATCC reference strains representing 35 clinically relevant gram-positive species (Abiotrophia defectiva ATCC 49176, Bifidobacterium breve ATCC 15700, Clostridium difficile ATCC 9689, Corynebacterium urealyticum ATCC 43042, Enterococcus casseliflavus ATCC 25788, Enterococcus durans ATCC 19432, Enterococcus faecalis ATCC 29212, Enterococcus faecium ATCC 19434, Enterococcus gallinarum ATCC 49573, Enterococcus raffinosus ATCC 49427, Lactobacillus reuteri ATCC 23273, Lactococcus lactis ATCC 19435, Listeria monocytogenes ATCC 15313, Peptococcus niger ATCC 27731, Peptostreptococcus anaerobius ATCC 27337, Peptostreptococcus prevotii ATCC 9321, Staphylococcus aureus ATCC 25923, Staphylococcus epidermidis ATCC 14990, Staphylococcus haemolyticus ATCC 29970, Staphylococcus saprophyticus ATCC 15305, Streptococcus agalactiae ATCC 27591, Streptococcus anginosus ATCC 33397, Streptococcus bovis ATCC 33317, Streptococcus constellatus ATCC 27823, Streptococcus dysgalactiae ATCC 43078, Streptococcus gordonii ATCC 10558, Streptococcus mitis ATCC 33399, Streptococcus mutans ATCC 25175, Streptococcus oralis ATCC 35037, Streptococcus parauberis ATCC 6631, Streptococcus pneumoniae ATCC 6303, Streptococcus pyogenes ATCC 19615, Streptococcus salivarius ATCC 7073, Streptococcus sanguinis ATCC 10556, Streptococcus uberis ATCC 19436). These microbial species included 15 species of streptococci and many members of the normal vaginal and anal floras. In addition, 40 GBS isolates of human origin, whose identification was confirmed by a latex agglutination test (Streptex, Murex), were also used to evaluate the ubiquity of the assay.

[0263] For determination of the sensitivities (i.e., the minimal number of genome copies that could be detected) for conventional and LightCycler™ PCR assays, serial 10-fold or 2-fold dilutions of purified genomic DNA from 5 GBS ATCC strains were used.

### Results

[0264] Evaluation of the GBS-specific conventional and LightCycler™ PCR assays. The specificity of the two assays demonstrated that only DNAs from GBS strains could be amplified. Both PCR assays did not amplify DNAs from any other bacterial species tested including 14 streptococcal species other than GBS as well as phylogenetically related species belonging to the genera Enterococcus, Peptostreptococcus and Lactococcus. Important members of the vaginal or anal flora, including coagulase-negative staphylococci, Lactobacillus sp., and Bacteriodes sp. were also negative with the GBS-specific PCR assay. The LightCycler™ PCR assays detected only GBS DNA by producing an increased fluorescence signal which was interpreted as a positive PCR result. Both PCR methods were able to amplify all of 40 GBS clinical isolates, showing a perfect correlation with the phenotypic identification methods.

[0265] The sensitivity of the assay was determined by using purified genomic DNA from the 5 ATCC strains of GBS. The detection limit for all of these 5 strains was one genome copy of GBS. The detection limit of the assay with the LightCycler™ was 3.5 fg of genomic DNA (corresponding to 1-2 genome copies of GBS). These results confirmed the high sensitivity of our GBS-specific PCR assay.

[0266] Direct Detection of GBS from vaginal/anal specimens. Among 66 vaginal/anal specimens tested, 11 were positive for GBS by both culture and PCR. There was one sample positive by culture only. The sensitivity of both PCR methods with vaginal/anal specimens for identifying colonization status in pregnant women at delivery was 91.7% when compared to culture results. The specificity and positive predictive values were both 100% and the negative predictive value was 97.8%. The time for obtaining results was approximately 45 min for LightCycler™ PCR, approximately 100 min for conventional PCR and 48 hours for culture.

### Conclusion

[0267] We have developed two PCR assays (conventional and LightCycler™) for the detection of GBS, which are specific (i.e., no amplification of DNA from a variety of bacterial species other than GBS) and sensitive (i.e., able to detect around 1 genome copy for several reference ATCC strains of GBS). Both PCR assays are able to detect GBS directly from vaginal/anal specimens in a very short turnaround time. Using the real-time PCR assay on LightCycler™, we can detect GBS carriage in pregnant women at delivery within 45 minutes.

### Example 15

### Simultaneous Detection and Identification of Streptococcus pyogenes and its Pyrogenic Exotoxin A

[0268] The rapid detection of Streptococcus pyogenes and of its pyrogenic exotoxin A is of clinical importance. We developed a multiplex assay which permits the detection of strains of S. pyogenes carrying the pyrogenic toxin A gene, which is associated with scarlet fever and other pathologies. In order to specifically detect S. pyogenes, nucleotide sequences of the pyrrolidone carboxylyl peptidase (pcp) gene were aligned to design PCR primers Spy291 (SEQ ID NO. 1211) and Spy473 (SEQ ID NO. 1210). Next, we designed primers for the specific detection of the pyrogenic exotoxin A. Nucleotide sequences of the speA gene, carried on the bacteriophage T12, were aligned as shown in Annex XXIII to design PCR primers Spytx814 (SEQ ID NO. 994) and Spytx 927 (SEQ ID NO. 995).

[0269] The primer pairs: oligos SEQ ID NOs. 1210-1211, yielding an amplification product of 207 bp, and oligos SEQ ID NOs. 994-995, yielding an amplification product of 135 bp, were used in a multiplex PCR assay.

[0270] PCR amplification was carried out using 0.4 μM of both pairs of primers, 2.5 mM MgCl₂, BSA 0.05 μM, dNTP 0.2 μM (Pharmacia), 10 mM Tris-HCl (pH 9.0), 0.1% Triton X-100, 2.5 mM MgCl₂, 0.5 U Taq DNA polymerase (Promega) coupled with TaqStart™ antibody (Clontech Laboratories Inc.), and 1 μl of genomic DNA sample in a final volume of 20 μl. PCR amplification was performed using a PTC-200 thermal cycler (MJ Research). The optimal cycling conditions for maximum specificity and sensitivity were 3 minutes at 94° C. for initial denaturation, then forty cycles of two steps consisting of 1 second at 95° C. and 30 seconds at 63° C., followed by a final step of 2 minutes at 72° C. Detection of the PCR products was made by electrophoresis in agarose gels (2%) containing 0.25 μg/ml of ethidium bromide. Visualization of the PCR products was made under UV at 254 nm.

[0271] The detection limit was less than 5 genome copies for both S. pyogenes and its pyrogenic exotoxin A. The assay was specific for pyrogenic exotoxin A-producing S. pyogenes: strains of the 27 other species of Streptococcus tested, as well as 20 strains of various gram-positive and gram-negative bacterial species were all negative.

[0272] A similar approach was used to design an alternative set of speA-specific primers (SEQ ID NOs. 996 to 998, see Annex XXIV). In addition, another set of primers based on the tuf gene (SEQ ID NOs. 999 to 1001, see Annex XXV) could be used to specifically detect Streptococcus pyogenes.

### Example 16

### Real-Time Detection and Identification of Shiga Toxin-Producing Bacteria

[0273] Shiga toxin-producing Escherichia coli and Shigella dysenteriae cause bloody diarrhea. Currently, identification relies mainly on the phenotypic identification of S. dysenteriae and E. coli serotype O157:H7. However, other serotypes of E. coli are increasingly found to be producers of type 1 and/or type 2 Shiga toxins. Two pairs of PCR primers targeting highly conserved regions present in each of the Shiga toxin genes stx₁ and stx₂ were designed to amplify all variants of those genes (see Annexes XXVI and XXVII). The first primer pair, oligonucleotides 1SLT224 (SEQ ID NO. 1081) and 1SLT385 (SEQ ID NO. 1080), yields an amplification product of 186 bp from the stx₁ gene. For this amplicon, the 1SLTB1-Fam (SEQ ID NO. 1084) molecular beacon was designed for the specific detection of stx₁ using the fluorescent label 6-carboxy-fluorescein. The 1SltS1-FAM (SEQ ID NO. 2012) molecular scorpion was also designed as an alternate way for the specific detection of stx₁. A second pair of PCR primers, oligonucleotides 2SLT537 (SEQ ID NO. 1078) and 2SLT678b (SEQ ID NO. 1079), yields an amplification product of 160 bp from the stx₂ gene. Molecular beacon 2SLTB1-Tet (SEQ ID NO. 1085) was designed for the specific detection of stx₂ using the fluorescent label 5-tetrachloro-fluorescein. Both primer pairs were combined in a multiplex PCR assay.

[0274] PCR amplification was carried out using 0.8 μM of primer pair SEQ ID NOs. 1080-1081, 0.5 μM of primer pair SEQ ID NOs. 1078-1079, 0.3 μM of each molecular beacon, 8 mM MgCl₂, 490 μg/mL BSA, 0.2 mM dNTPs (Pharmacia), 50 mM Tris-HCl, 16 mM NH₄SO₄, 1× TaqMaster (Eppendorf), 2.5 U KlenTaq1 DNA polymerase (AB Peptides) coupled with TaqStart™ antibody (Clontech Laboratories Inc.), and 1 μl of genomic DNA sample in a final volume of 25 μl. PCR amplification was performed using a SmartCycler thermal cycler (Cepheid). The optimal cycling conditions for maximum sensitivity and specificity were 60 seconds at 95° C. for initial denaturation, then 45 cycles of three steps consisting of 10 seconds at 95° C., 15 seconds at 56° C. and 5 seconds at 72° C. Detection of the PCR products was made in real-time by measuring the fluorescent signal emitted by the molecular beacon when it hybridizes to its target at the end of the annealing step at 56° C.

[0275] The detection limit was the equivalent of less than 5 genome copies. The assay was specific for the detection of both toxins, as demonstrated by the perfect correlation between PCR results and the phenotypic characterization performed using antibodies specific for each Shiga toxin type. The assay was successfully performed on several Shiga toxin-producing strains isolated from various geographic areas of the world, including 10 O157:H7 E. coli, 5 non-O157:H7 E. coli and 4 S. dysenteriae.

### Example 17

### Development of a PCR Assay for the Detection and Identification of Staphylococci at Genus and Species Levels and its Associated mecA Gene

[0276] The Staphylococcus-specific PCR primers described in Example 7 (SEQ ID NOs. 553 and 575) were used in multiplex with the mecA-specific PCR primers and the S. aureus-specific primers described in our assigned U.S. Pat. No. 5,994,066 (SEQ ID NOs. 261 and 262 for mecA and SEQ ID NOs. 152 and 153 for S. aureus in the said patent). Sequence alignment analysis of 10 publicly available mecA gene sequences allowed to design an internal probe specific to mecA (SEQ ID NO. 1177). An internal probe was also designed for the S. aureus-specific amplicon (SEQ ID NO 1234). PCR amplification and agarose gel electrophoresis of the amplified products were performed as described in Example 7, with the exception that 0.4 μM (each) of the two Staphylococcus-specific primers (SEQ ID NOs. 553 and 575) and 0.4 μM (each) of the mecA-specific primers and 0.4 μM (each) of the S. aureus-specific primers were used in the PCR mixture. The specificity of the multiplex assay with 40-cycle PCR protocols was verified by using purified genomic DNA from five methicillin-resistant and fifteen methicillin-sensitive staphylococcal strains. The sensitivity of the multiplex assay with 40-cycle PCR protocols was determined by using purified genomic DNA from twenty-three methicillin-resistant and twenty-eight methicillin-sensitive staphylococcal strains. The detection limit was 2 to 10 genome copies of genomic DNA, depending on the staphylococcal species tested. Furthermore, the mecA-specific internal probe, the S. aureus-specific internal probe and the coagulase-negative staphylococci-specific internal probe (described in Example 7) were able to recognize twenty-three methicillin-resistant staphylococcal strains and twenty-eight methicillin-sensitive staphylococcal strains with high sensitivity and specificity.

[0277] The format of the assay is not limited to the one described above. A person skilled in the art could adapt the assay for different formats such as PCR with real-time detection using molecular beacon probes. Molecular beacon probes designed to be used in this assay include, but are not limited to, SEQ ID NO. 1232 for detection of the S. aureus-specific amplicon, SEQ ID NO. 1233 for detection of coagulase-negative staphylococci and SEQ ID NO. 1231 for detection of mecA.

[0278] Alternatively, a multiplex PCR assay containing the Staphylococcus-specific PCR primers described in Example 7 (SEQ ID NOs. 553 and 575) and the mecA-specific PCR primers described in our assigned U.S. Pat. No. 5,994,066 (SEQ ID NOs. 261 and 262 in the said patent) were developed. PCR amplification and agarose gel electrophoresis of the amplified products were performed as described in Example 7, with the exception that 0.4 μM (each) of the Staphylococcus-specific primers (SEQ ID NOs. 553 and 575) and 0.4 μM (each) of the mecA-specific primers described in our assigned U.S. Pat. No. 5,994,066 (SEQ ID NOs. 261 and 262 in the said patent) were used in the PCR mixture. The sensitivity of the multiplex assay with 40-cycle PCR protocols was determined by using purified genomic DNA from two methicillin-resistant and five methicillin-sensitive staphylococcal strains. The detection limit was 2 to 5 copies of genomic DNA, depending on the staphylococcal species tested. The specificity of the multiplex PCR assay coupled with capture-probe hybridization was tested with two strains of methicillin-resistant S. aureus, two strains of methicillin-sensitive S. aureus and seven strains of methicillin-sensitive coagulase-negative staphylococci. The mecA-specific internal probe (SEQ ID NO. 1177) and the S. aureus-specific internal probe (SEQ ID NO. 587) described in Example 7 were able to recognize all the strains with high specificity showing a perfect correlation with susceptibility to methicillin. The sensitivity of the PCR assay coupled with capture-probe hybridization was tested with one strain of methicillin-resistant S. aureus. The detection limit was around 10 copies of genomic DNA.

### Example 18

### Sequencing of pbp1a, pbp2b and pbp2x Genes of Streptoccoccus pneumoniae

[0279] Penicillin resistance in Streptococcus pneumoniae involves the sequential alteration of up to five penicillin-binding proteins (PBPs) 1A, 1B, 2A, 2X and 2B in such a way that their affinity is greatly reduce toward the antibiotic molecule. The altered PBP genes have arisen as the result of interspecies recombination events from related streptococcal species. Among the PBPs usually found in S. pneumoniae, PBPs 1A, 2B, and 2X play the most important role in the development of penicillin resistance. Alterations in PBP 2B and 2X mediate low-level resistance to penicillin while additional alterations in PBP 1A plays a significant role in full penicillin resistance.

[0280] In order to generate a database for pbp sequences that can be used for design of primers and/or probes for the specific and ubiquitous detection of β-lactam resistance in S. pneumoniae, pbp1a, pbp2b and pbp2x DNA fragments sequenced by us or selected from public databases (GenBank and EMBL) from a variety of S. pneumoniae strains were used to design oligonucleotide primers. This database is essential for the design of specific and ubiquitous primers and/or probes for detection of β-lactam resistance in S. pneumoniae since the altered PBP 1A, PBP 2B and PBP 2X of β-lactam resistant S. pneumoniae are encoded by mosaic genes with numerous sequence variations among resistant isolates. The PCR primers were located in conserved regions of pbp genes and were able to amplify pbp1a, pbp2b, and pbp2x sequences of several strains of S. pneumoniae having various levels of resistance to penicillin and third-generation cephalosporins. Using primer pairs SEQ ID NOs. 1125 and 1126, SEQ ID NOs. 1142 and 1143, SEQ ID NOs. 1146 and 1147, it was possible to amplify and determine pbp1a sequences SEQ ID NOs. 1004-1018, 1648, 2056-2060 and 2062-2064, pbp2b sequences SEQ ID NOs. 1019-1033, and pbp2x sequences SEQ ID NOs. 1034-1048. Six other PCR primers (SEQ ID NOs. 1127-1128, 1144-1145, 1148-1149) were also designed and used to complete the sequencing of pbp1a, pbp2b and pbp2x amplification products. The described primers (SEQ ID NOs. 1125 and 1126, SEQ ID NOs. 1142 and 1143, SEQ ID NOs. 1146 and 1147, SEQ ID NOs. 1127-1128, 1144-1145, 1148-1149) represent a powerful tool for generating new pbp sequences for design of primers and/or probes for detection of β-lactam resistance in S. pneumoniae.

### Example 19

### Sequencing of hexA Genes of Streptococcus Species

[0281] The hexA sequence of S. pneumoniae described in our assigned U.S. Pat. No. 5,994,066 (SEQ ID NO. 31 in the said patent, SEQ ID NO. 1183 in the present application) allowed the design of a PCR primer (SEQ ID NO. 1182) which was used with primer Spn1401 described in our assigned U.S. Pat. No. 5,994,066 (SEQ ID NO. 156 in the said patent, SEQ ID NO. 1179 in the present application) to generate a database for hexA sequences that can be used to design primers and/or probes for the specific identification and detection of S. pneumoniae (Annex XLII). Using primers SEQ ID NO. 1179 and SEQ ID NO. 1182 (Annex XLII), it was possible to amplify and determine the hexa sequence from S. pneumoniae (4 strains) (SEQ ID NOs. 1184-1187), S. mitis (three strains) (SEQ ID NOs. 1189-1191) and S. oralis (SEQ ID NO. 1188).

### Example 20

### Development of Multiplex PCR Assays Coupled with Capture Probe Hybridization for the Detection and Identification of Streptococcus pneumoniae and its Penicillin Resistance Genes

[0282] Two different assays were developed to identify S. pneumoniae and its susceptibility to penicillin.

### Assay I:

[0283] Bacterial strains. The specificity of the multiplex PCR assay was verified by using a panel of ATCC (American Type Culture Collection) reference strains consisting of 33 gram-negative and 67 gram-positive bacterial species (Table 13). In addition, a total of 98 strains of S. pneumoniae, 16 strains of S. mitis and 3 strains of S. oralis from the American Type Culture Collection, the microbiology laboratory of the Centre Hospitalier Universitaire de Quebec, Pavillon Centre Hospitalier de l'Université Laval (CHUL), (Step-Foy, Quebec, Canada), the Laboratoire de santé publique du Québec, (Sainte-Anne-de-Bellevue, Québec, Canada), the Sunnybrook and Women's College Health Sciences Centre (Toronto, Canada), the Infectious Diseases Section, Department of Veterans Affairs Medical Center, (Houston, USA) were also tested to further validate the Streptococcus pneumoniae-specific PCR assay. The penicillin MICs (minimal inhibitory concentrations) were measured by the broth dilution method according to the recommended protocol of NCCLS.

[0284] PCR primers and internal probes. The analysis of hexA sequences from a variety of streptococcal species from the publicly available hexA sequence and from the database described in Example 19 (SEQ ID NOs. 1184-1191) allowed the selection of a PCR primer specific to S. pneumoniae, SEQ ID NO. 1181. This primer was used with the S. pneumoniae-specific primer SEQ ID NO. 1179 to generate an amplification product of 241 bp (Annex XLII). The PCR primer SEQ ID NO. 1181 is located 127 nucleotides downstream on the hexA sequence compared to the original S. pneumoniae-specific PCR primer Spn1515 described in our assigned U.S. Pat. No. 5,994,066 (SEQ ID NO. 157 in the said patent). These modifications were done to ensure the design of the S. pneumoniae-specific internal probe according to the new hexa sequences of several streptococcal species from the database described in Example 19 (SEQ ID NOs. 1184-1191).

[0285] The analysis of pbp1a sequences from S. pneumoniae strains with various levels of penicillin resistance from public databases and from the database described in Example 18 allowed the identification of amino acid substitutions Ile-459 to Met and Ser-462 to Ala that occur in isolates with high-level penicillin resistance (MICs ≧1 μg/ml), and amino acid substitutions Ser-575 to Thr, Gln-576 to Gly and Phe-577 to Tyr that are common to all penicillin-resistant isolates with MICs ≧0.25 μg/ml. As shown in Annex XXXI, PCR primer pair SEQ ID NOs. 1130 and 1131 were designed to detect high-level penicillin resistance (MICs ≧1 μg/ml), whereas PCR primer pair SEQ ID NOs. 1129 and 1131 were designed to detect intermediate- and high-level penicillin resistance (MICs ≧0.25 μg/ml).

[0286] The analysis of hexA sequences from the publicly available hexA sequence and from the database described in Example 19 allowed the design of an internal probe specific to S. pneumoniae (SEQ ID NO. 1180) (Annex XLII). The range of mismatches between the S. pneumoniae-specific 241-bp amplicon was from 2 to 5, in the middle of the 19-bp probe. The analysis of pbp1a sequences from public databases and from the database described in Example 18 allowed the design of five internal probes containing all possible mutations to detect the high-level penicillin resistance 383-bp amplicon (SEQ ID NOs. 1197, 1217-1220). Alternatively, two other internal probes (SEQ ID NOs. 2024-2025) can also be used to detect the high-level penicillin resistance 383-bp amplicon. Five internal probes containing all possible mutations to detect the 157-bp amplicon which includes intermediate- and high-level penicillin resistance were also designed (SEQ ID NOs. 1094, 1192-1193, 1214 and 1216). Design and synthesis of primers and probes, and detection of the probe hybridization were performed as described in Example 7. Annex XXXI illustrates one of the internal probe for detection of the high-level penicillin resistance 383-bp amplicon (SEQ ID NO. 1197) and one of the internal probe for detection of the intermediate- and high-level penicillin resistance 157-bp amplicon (SEQ ID NO. 1193).

[0287] PCR amplification. For all bacterial species, amplification was performed from purified genomic DNA using a PTC-200 thermocycler (MJ Research). 1 μl of genomic DNA at 0.1 ng/μl, or 1 μl of a bacterial lysate, was transferred to a 19 μl PCR mixture. Each PCR reaction contained 50 mM KCl, 10 mM Tris-HCl (H 9.0), 0.1% Triton X-100, 2.5 mM MgCl₂, 0.1 μM (each) of the S. pneumoniae-specific primers SEQ ID NO. 1179 and SEQ ID NO. 1181, 0.2 μM of primer SEQ ID NO. 1129, 0.7 μM of primer SEQ ID NO. 1131, and 0.6 μM of primer SEQ ID NO. 1130, 0.05 mM bovine serum albumin (BSA), and 0.5 U Taq polymerase (Promega) coupled with TaqStart™ antibody. In order to generate Digoxigenin (DIG)-labeled amplicons for capture probe hybridization, 0.1×PCR DIG labeling four deoxynucleoside triphosphates mix (Boehringer Mannheim GmbH) was used for amplification.

[0288] For determination of the sensitivity of the PCR assays, 10-fold dilutions of purified genomic DNA were used to determine the minimal number of genome copies which can be detected.

[0289] Capture probe hybridization. The DIG-labeled amplicons were hybridized to the capture probes bound to 96-well plates. The plates were incubated with anti-DIG-alkaline phosphatase and the chemiluminescence was measured by using a luminometer (MLX, Dynex Technologies Inc.) after incubation with CSPD and recorded as Relative Light Unit (RLU). The RLU ratio of tested sample with and without captures probes was then calculated. A ratio ≧2.0 was defined as a positive hybridization signal. All reactions were performed in duplicate.

### Results

[0290] Amplifications with the multiplex PCR assay. The specificity of the assay was assessed by performing 40-cycle PCR amplifications with the panel of gram-positive (67 species from 12 genera) and gram-negative (33 species from 17 genera) bacterial species listed in Table 13. All bacterial species tested other than S. pneumoniae were negative except S. mitis and S. oralis. Ubiquity tests were performed using a collection of 98 S. pneumoniae strains including high-level penicillin resistance (n=53), intermediate resistance (n=12) and sensitive (n=33) strains. There was a perfect correlation between PCR and standard susceptibility testing for 33 penicillin-sensitive isolates. Among 12 S. pneumoniae isolates with intermediate penicillin resistance based on susceptibility testing, 11 had intermediate resistance based on PCR, but one S. pneumoniae isolate with penicillin MIC of 0.25 μg/ml showed a high-level penicillin resistance based on genotyping. Among 53 isolates with high-level penicillin resistance based on susceptibility testing, 51 had high-level penicillin resistance based on PCR but two isolates with penicillin MIC >1 μg/ml showed an intermediate penicillin resistance based on genotyping. In general, there was a good correlation between the genotype and classical culture method for bacterial identification and susceptibility testing.

[0291] The sensitivity of the S. pneumoniae-specific assay with 40-cycle PCR protocols was determined by using purified genomic DNA from 9 isolates of S. pneumoniae. The detection limit was around 10 copies of genomic DNA for all of them.

[0292] Post-PCR hybridization with internal probes. The specificity of the multiplex PCR assay coupled with capture-probe hybridization was tested with 98 strains of S. pneumoniae, 16 strains of S. mitis and 3 strains of S. oralis. The internal probe specific to S. pneumoniae (SEQ ID NO. 1180) detected all 98 S. pneumoniae strains but did not hybridize to the S. mitis and S. oralis amplicons. The five internal probes specific to the high-level resistance amplicon (SEQ ID NOs. 1197, 1217-1220) detected all amplification patterns corresponding to high-level resistance. The two S. pneumoniae trains with penicillin MIC >1 μg/ml that showed an intermediate penicillin resistance based on PCR amplification were also intermediate resistance based on probe hybridization. Similarly, among 12 strains with intermediate-penicillin resistance based on susceptibility testing, 11 showed intermediate-penicillin resistance based on hybridization with the five internal probes specific to the intermediate and high-level resistance amplicon (SEQ ID NOs. 1094, 1192-1193, 1214 and 1216). The strain described above having a penicillin MIC of 0.25 μg/ml which was high-level penicillin resistance based on PCR amplification was also high-level resistance based on probe hybridization. In summary, the combination of the multiplex PCR and hybridization assays results in a highly specific test for the detection of penicillin-resistant Streptococcus pneumoniae.

### Assay II:

[0293] Bacterial strains. The specificity of the multiplex PCR assay was verified by using the same strains as those used for the development of Assay I. The penicillin MICs (minimal inhibitory concentrations) were measured by the broth dilution method according to the recommended protocol of NCCLS.

[0294] PCR primers and internal probes. The analysis of pbp1a sequences from S. pneumoniae strains with various levels of penicillin resistance from public databases and from the database described in Example 18 allowed the design of two primers located in the constant region of pbp1a. PCR primer pair (SEQ ID NOs. 2015 and 2016) was designed to amplify a 888-bp variable region of pbp1a from all S. pneumoniae strains. A series of internal probes were designed for identification of the pbp1a mutations associated with penicillin resistance in S. pneumoniae. For detection of high-level penicillin resistance (MICs ≧1 μg/ml), three internal probes were designed (SEQ ID NOs. 2017-2019). Alternatively, ten other internal probes were designed that can also be used for detection of high-level resistance within the 888-bp pbp1a amplicon: (1) three internal probes for identification of the amino acid substitutions Thr-371 to Ser or Ala within the motif S370TMK (SEQ ID NOs. 2031-2033); (2) two internal probes for detection of the amino acid substitutions Ile-459 to Met and Ser-462 to Ala near the motif S428RN (SEQ ID NOs. 1135 and 2026); (3) two internal probes for identification of the amino acid substitutions Asn-443 to Asp (SEQ ID NOs. 1134 and 2027); and (4) three internal probes for detection of all sequence variations within another region (SEQ ID NOs. 2028-2030). For detection of high-level and intermediate penicillin resistance (MICs ≧0.25 μg/ml), four internal probes were designed (SEQ ID NOs. 2020-2023). Alternatively, six other internal probes were designed for detection of the four consecutive amino acid substitutions T574SQF to AS74TGY near the motif K557TG (SEQ ID NOs. 2034-2039) that can also be used for detection of intermediate- and high-level resistance within the 888-bp pbp1a amplicon.

[0295] PCR amplification. For all bacterial species, amplification was performed from purified genomic DNA using a PTC-200 thermocycler (MJ Research). 1 μl of genomic DNA at 0.1 ng/μl, or 1 μl of a bacterial lysate, was transferred to a 19 μl PCR mixture. Each PCR reaction contained 50 mM KCl, 10 mM Tris-HCl (pH 9.0), 0.1% Triton X-100, 2.5 mM MgCl₂, 0.08 μM (each) of the S. pneumoniae-specific primers SEQ ID NO. 1179 and SEQ ID NO. 1181, 0.4 μM of the pbp1a-specific primer SEQ ID NO. 2015, 1.2 μM of pbp1a-specific primer. SEQ ID NO. 2016, 0.05 mM bovine serum albumin (BSA), and 0.5 U Taq polymerase (Promega) coupled with TaqStart™ antibody. In order to generate Digoxigenin (DIG)-labeled amplicons for capture probe hybridization, 0.1×PCR DIG labeling four deoxynucleoside triphosphates mix (Boehringer Mannheim GmbH) was used for amplification.

[0296] For determination of the sensitivities of the PCR assays, 10-fold dilutions of purified genomic DNA were used to determine the minimal number of genome copies which can be detected.

[0297] Capture probe hybridization. The DIG-labeled amplicons were hybridized to the capture probes bound to 96-well plates as described for Assay I.

### Results

[0298] Amplifications with the multiplex PCR assay. The specificity of the assay was assessed by performing 40-cycle PCR amplifications with the panel of gram-positive (67 species from 12 genera) and gram-negative (33 species from 17 genera) bacterial species listed in Table 13. All bacterial species tested other than S. pneumoniae were negative except S. mitis and S. oralis. Ubiquity tests were performed using a collection of 98 S. pneumoniae strains including high-level penicillin resistance (n=53), intermediate resistance (n=12) and sensitive (n=33) strains. All the above S. pneumoniae strains produced the 888-bp amplicon corresponding to pbp1a and the 241-bp fragment corresponding to hexA.

[0299] The sensitivity of the S. pneumoniae-specific assay with 40-cycle PCR protocols was determined by using purified genomic DNA from 9 isolates of S. pneumoniae. The detection limit was around 10 copies of genomic DNA for all of them.

[0300] Post-PCR hybridization with internal probes. The specificity of the multiplex PCR assay coupled with capture-probe hybridization was tested with 98 strains of S. pneumoniae, 16 strains of S. mitis and 3 strains of S. oralis. The internal probe specific to S. pneumoniae (SEQ ID NO. 1180) detected all 98 S. pneumoniae strains but did not hybridize to the S. mitis and S. oralis amplicons. The three internal probes (SEQ ID NOs 2017-2019) specific to high-level resistance detected all the 43 strains with high-level penicillin resistance based on susceptibility testing. Among 12 isolates with intermediate-penicillin resistance based on susceptibility testing, 11 showed intermediate-penicillin resistance based on hybridization with 4 internal probes (SEQ ID NOs. 2020-2023) and one strain having penicillin MIC of 0.25 μg/ml was misclassified as high-level penicillin resistance. In summary, the combination of the multiplex PCR and hybridization assays results in a highly specific test for the detection of penicillin-resistant Streptococcus pneumoniae.

### Example 21

### Sequencing of the Vancomycin Resistance vanA, vanC1, vanC2 and vanC3 Genes

[0301] The publicly available sequences of the vanH-vanA-vanX-vanY locus of transposon Tn1546 from E. faecalis, vanC1 sequence from one strain of E. gallinarum, vanC2 and vanC3 sequences from a variety of E. casseliflavus and E. flavescens strains, respectively, allowed the design of PCR primers able to amplify the vanA, vanC1, vanC2 and vanC3 sequences of several Enterococcus species. Using primer pairs van6877 and van9106 (SEQ ID NOs. 1150 and 1155), vanC1-122 and vanC1-1315 (SEQ ID NOs. 1110 and 1109), and vanC2C3-1 and vanC2C3-1064 (SEQ ID NOs. 1108 and 1107), it was possible to amplify and determine vanA sequences SEQ ID NOs. 1049-1057, vanC1 sequences SEQ ID NOs. 1058-1059, vanC2 sequences SEQ ID NOs. 1060-1063 and vanC3 sequences SEQ ID NOs. 1064-1066, respectively. Four other PCR primers (SEQ ID NOs. 1151-1154) were also designed and used to complete the sequencing of vanA amplification products.

### Example 22

### Development of a PCR Assay for the Detection and Identification of Enterococci at Genus and Species Levels and its Associated Resistance Genes vanA and vanB

[0302] The comparison of vanA and vanB sequences revealed conserved regions allowing the design of PCR primers specific to both vanA and vanB sequences (Annex XXXVIII). The PCR primer pair vanAB459 and vanAB830R (SEQ ID NOs. 1112 and 1111) was used in multiplex with the Enterococcus-specific primers Encg313dF and Encg599c (SEQ ID NOs. 1137 and 1136) described in Example 11. Sequence alignment analysis of vanA and vanB sequences revealed regions suitable for the design of internal probes specific to vanA (SEQ ID NO. 1170) and vanB (SEQ ID NO. 1171). PCR amplification and agarose gel electropheresis of the amplified products were performed as described in Example 11. The optimal cycling conditions for maximum sensitivity and specificity were found to be 3 min. at 94° C., followed by forty cycles of two steps consisting of 1 second at 95° C. and 30 seconds at 62° C., plus a terminal extension at 72° C. for 2 minutes. The specificity of the multiplex assay with 40-cycle PCR was verified by using 0.1 nanogram of purified genomic DNA from a panel of bacteria listed in Table 10. The sensitivity of the multiplex assay with 40-cycle PCR was verified with three strains of E. casseliflavus, eight strains of E. gallinarum, two strains of E. flavescens, two vancomycin-resistant strains of E. faecalis and one vancomycin-sensitive strain of E. faecalis, three vancomycin-resistant strains of E. faecium, one vancomycin-sensitive strain of E. faecium and one strain of each of the other enterococcal species listed in Table 10. The detection limit was 1 to 10 copies of genomic DNA, depending on the enterococcal species tested. The vanA- and vanB-specific internal probes (SEQ ID NOs. 1170 and 1171), as well as the E. faecalis- and E. faecium-specific internal probes (SEQ ID NOs. 1174 and 602) and the internal probe specific to the group including E. casseliflavus, E. gallinarum and E. flavescens (SEQ ID NO. 1122) described in Example 11, were able to recognize vancomycin-resistant enterococcal species with high sensitivity, specificity and ubiquity showing a perfect correlation between the genotypic and phenotypic analysis.

[0303] The format of the assay is not limited to the one described above. A person skilled in the art could adapt the assay for different formats such as PCR with real-time detection using molecular beacon probes. Molecular beacon probes designed to be used in this assay include, but are not limited to, SEQ ID NO. 1236 for the detection of E. faecalis, SEQ ID NO. 1235 for the detection of E. faecium, SEQ ID NO. 1240 for the detection of vanA, and SEQ ID NO. 1241 for the detection of vanB.

### Example 23

### Development of a Multiplex PCR Assay for Detection and Identification of Vancomycin-Resistant Enterococcus faecalis, Enterococcus faecium and the Group Including Enterococcus gallinarum, Enterococcus casseliflavus, and Enterococcus flavescens

[0304] The analysis of vanA and vanB sequences revealed conserved regions allowing design of a PCR primer pair (SEQ ID NOs. 1089 and 1090) specific to vanA sequences (Annex XXVIII) and a PCR primer pair (SEQ ID NOs. 1095 and 1096) specific to vanB sequences (Annex XXIX). The vanA-specific PCR primer pair (SEQ ID NOs. 1089 and 1090) was used in multiplex with the vanB-specific PCR primer pair described in our assigned U.S. Pat. No. 5,994,066 (SEQ ID NOs. 1095 and 1096 in the present patent and SEQ ID NOs. 231 and 232 in the said patent). The comparison of vanC1, vanC2 and vanC3 sequences revealed conserved regions allowing design of PCR primers (SEQ ID NOs. 1101 and 1102) able to generate a 158-bp amplicon specific to the group including E. gallinarum, E. casseliflavus and E. flavescens (Annex XXX). The vanC-specific PCR primer pair (SEQ ID NOs. 1101 and 1102) was used in multiplex with the E. faecalis-specific PCR primer pair described in our assigned U.S. Pat. No. 5,994,066 (SEQ ID NOs. 40 and 41 in the said patent) and with the E. faecium-specific PCR primer pair described in our patent publication WO98/20157 (SEQ ID NOs. 1 and 2 in the said publication). For both multiplexes, the optimal cycling conditions for maximum sensitivity and specificity were found to be 3 min. at 94° C., followed by forty cycles of two steps consisting of 1 second at 95° C. and 30 seconds at 58° C., plus a terminal extension at 72° C. for 2 minutes. Detection of the PCR products was made by electrophoresis in agarose gels (2%) containing 0.25 μg/ml of ethidium bromide. The vanA-specific PCR primer pair (SEQ ID NOs. 1089 and 1090), the vanB-specific primer pair (SEQ ID NOs. 1095 and 1096) and the vanC-specific primer pair (SEQ ID NOs. 1101 and 1102) were tested for their specificity by using 0.1 nanogram of purified genomic DNA from a panel of 5 vancomycin-sensitive Enterococcus species, 3 vancomycin-resistant Enterococcus species, 13 other gram-positive bacteria and one gram-negative bacterium. Specificity tests were performed with the E. faecium-specific PCR primer pair described in our patent publication WO98/20157 (SEQ ID NOs. 1 and 2 in the said publication) and with the E. faecalis-specific PCR primer pair described in our assigned U.S. Pat. No. 5,994,066 (SEQ ID NOs. 40 and 41 in the said patent) on a panel of 37 gram-positive bacterial species. All Enterococcus strains were amplified with high specificity showing a perfect correlation between the genotypic and phenotypic analysis. The sensitivity of the assays was determined for several strains of E. gallinarum, E. casseliflavus, E. flavescens and vancomycin-resistant E. faecalis and E. faecium. Using each of the E. faecalis- and E. faecium-specific PCR primer pairs as well as vanA-, vanB- and vanC-specific PCR primers used alone or in multiplex as described above, the sensitivity ranged from 1 to 10 copies of genomic DNA.

[0305] The format of the assay is not limited to the one described above. A person skilled in the art could adapt the assay for different formats such as PCR with real-time detection using molecular beacon probes. Molecular beacon probes designed to be used in this assay include, but are not limited to, SEQ ID NO. 1238 for the detection of E. faecalis, SEQ ID NO. 1237 for the detection of E. faecium, SEQ ID NO. 1239 for the detection of vanA, and SEQ ID NO. 1241 for the detection of vanB.

[0306] Alternatively, another PCR assay was developed for the detection of vancomycin-resistant E. faecium and vancomycin-resistant E. faecalis. This assay included two multiplex: (1) the first multiplex contained the vanA-specific primer pair (SEQ ID NOs. 1090-1091) and the vanB-specific PCR primer pair described in our assigned U.S. Pat. No. 5,994,066 (SEQ ID NOs. 1095 and 1096 in the present patent and SEQ ID NOs. 231 and 232 in the said patent), and (2) the second multiplex contained the E. faecalis-specific PCR primer pair described in our assigned U.S. Pat. No. 5,994,066 (SEQ ID NOs. 40 and 41 in the said patent) and the E. faecium-specific PCR primer pair described in our patent publication WO98/20157 (SEQ ID NOs. 1 and 2 in the said publication). For both multiplexes, the optimal cycling conditions for maximum sensitivity and specificity were found to be 3 min. at 94° C., followed by forty cycles of two steps consisting of 1 second at 95° C. and 30 seconds at 58° C., plus a terminal extension at 72° C. for 2 minutes. Detection of the PCR products was made by electrophoresis in agarose gels (2%) containing 0.25 μg/ml of ethidium bromide. The two multiplexes were tested for their specificity by using 0.1 nanogram of purified genomic DNA from a panel of two vancomycin-sensitive E. faecalis strains, two vancomycin-resistant E. faecalis strains, two vancomycin-sensitive E. faecium strains, two vancomycin-resistant E. faecium strains, 16 other enterococcal species and 31 other gram-positive bacterial species. All the E. faecium and E. faecalis strains were amplified with high specificity showing a perfect correlation between the genotypic analysis and the susceptibility to glycopeptide antibiotics (vancomycin and teicoplanin). The sensitivity of the assay was determined for two vancomycin-resistant E. faecalis strains and two vancomycin-resistant E. faecium strains. The detection limit was 5 copies of genomic DNA for all the strains.

[0307] This multiplex PCR assay was coupled with capture-probe hybridization. Four internal probes were designed: one specific to the vanA amplicon (SEQ ID NO. 2292), one specific to the vanB amplicon (SEQ ID NO. 2294), one specific to the E. faecalis amplicon (SEQ ID NO. 2291) and one specific to the E. faecium amplicon (SEQ ID NO. 2287). Each of the internal probes detected their specific amplicons with high specificity and sensitivity.

### Example 24

### Universal Amplification Involving the EF-G (fusA) Subdivision of tuf Sequences

[0308] As shown in FIG. 3, primers SEQ ID NOs. 1228 and 1229 were designed to amplify the region between the end of fusA and the beginning of tuf genes in the str operon. Genomic DNAs from a panel of 35 strains were tested for PCR amplification with those primers. In the initial experiment, the following strains showed a positive result: Abiotrophia adiacens ATCC 49175, Abiotrophia defectiva ATCC 49176, Bacillus subtilis ATCC 27370, Closridium difficile ATCC 9689, Enterococcus avium ATCC 14025, Enterococcus casseliflavus ATCC 25788, Enterococcus cecorum ATCC 43198, Enterococcus faecalis ATCC 29212, Enterococcus faecium ATCC 19434, Enterococcus flavescens ATCC 49996, Enterococcus gallinarum ATCC 49573, Enterococcus solitarius ATCC 49428, Escherichia coli ATCC 11775, Haemophilus influenzae ATCC 9006, Lactobacillus acidophilus ATCC 4356, Peptococcus niger ATCC 27731, Proteus mirabilis ATCC 25933, Staphylococcus aureus ATCC 43300, Staphylococcus auricularis ATCC 33753, Staphylococcus capitis ATCC 27840, Staphylococcus epidemidis ATCC 14990, Staphylococcus haemolyticus ATCC 29970, Staphylococcus hominis ATCC 27844, Staphylococcus lugdunensis ATCC 43809, Staphylococcus saprophyticus ATCC 15305, Staphylococcus simulans ATCC 27848, and Staphylococcus warneri ATCC 27836. This primer pair could amplify additional bacterial species; however, there was no amplification for some species, suggesting that the PCR cycling conditions could be optimized or the primers modified. For example, SEQ ID NO. 1227 was designed to amplify a broader range of species.

[0309] In addition to other possible primer combinations to amplify the region covering fusA and tuf, FIG. 3 illustrates the positions of amplification primers SEQ ID NOs. 1221-1227 which could be used for universal amplification of fusA segments. All of the above mentioned primers (SEQ ID NOs. 1221-1229) could be useful for the universal and/or the specific detection of bacteria.

[0310] Moreover, different combinations of primers SEQ ID NOs. 1221-1229, sometimes in combination with tuf sequencing primer SEQ ID NO. 697, were used to sequence portions of the str operon, including the intergenic region. In this manner, the following sequences were generated: SEQ ID NOs. 1518-1526, 1578-1580, 1786-1821, 1822-1834, 1838-1843, 2184, 2187, 2188, 2214-2249, and 2255-2269.

### Example 25

### DNA Fragment Isolation from Staphylococcus saprophyticus by Arbitrarily Primed PCR

[0311] DNA sequences of unknown coding potential for the species-specific detection and identification of Staphylococcus saprophyticus were obtained by the method of arbitrarily primed PCR (AP-PCR).

[0312] AP-PCR is a method which can be used to generate specific DNA probes for microorganisms (Fani et al., 1993, Molecular Ecology 2:243-250). A description of the AP-PCR protocol used to isolate a species-specific genomic DNA fragment from Staphylococcus saprophyticus follows. Twenty different oligonucleotide primers of 10 nucleotides in length (all included in the AP-PCR kit OPAD (Operon Technologies, Inc., Alameda, Calif.)) were tested systematically with DNAs from 5 bacterial strains of Staphylococcus saprophyticus as well as with bacterial strains of 27 other staphylococcal (non-S. saprophyticus) species. For all bacterial species, amplification was performed directly from one μL (0.1 ng/μL) of purified genomic DNA. The 25 μL PCR reaction mixture contained 50 mM KCl, 10 mM Tris-HCl (pH 9.0), 0.1% Triton X-100, 2.5 mM MgCl₂, 1.2 μM of only one of the 20 different AP-PCR primers OPAD, 200 μM of each of the four dNTPs, 0.5 U of Taq DNA polymerase (Promega Corp., Madison, Wis.) coupled with TaqStart™ antibody (Clontech Laboratories Inc., Palo Alto, Calif.). PCR reactions were subjected to cycling using a MJ Research PTC-200 thermal cycler as follows: 3 min at 96° C. followed by 42 cycles of 1 min at 94° C. for the denaturation step, 1 min at 31° C. for the annealing step and 2 min at 72° C. for the extension step. A final extension step of 7 min at 72° C. followed the 42 cycles to ensure complete extension of PCR products. Subsequently, twenty microliters of the PCR-amplified mixture were resolved by electrophoresis on a 1.5% agarose gel containing 0.25 μg/ml of ethidium bromide. The size of the amplification products was estimated by comparison with a 50-bp molecular weight ladder.

[0313] Amplification patterns specific for Staphylococcus saprophyticus were observed with the AP-PCR primer OPAD-16 (sequence: 5′-AACGGGCGTC-3′). Amplification with this primer consistently showed a band corresponding to a DNA fragment of approximately 380 bp for all Staphylococcus saprophyticus strains tested but not for any of the other staphylococcal species tested.

[0314] The band corresponding to the 380 bp amplicon, specific and ubiquitous for S. saprophyticus based on AP-PCR, was excised from the agarose gel and purified using the QIAquick™ gel extraction kit (QIAGEN Inc.). The gel-purified DNA fragment was cloned into the T/A cloning site of the pCR 2.1™ plasmid vector (Invitrogen Inc.) using T4 DNA ligase (New England BioLabs). Recombinant plasmids were transformed into E. coli DH5α competent cells using standard procedures. All reactions were performed according to the manufacturer's instructions. Plasmid DNA isolation was done by the method of Birnboim and Doly (Nucleic Acid Res., 1979, 7:1513-1523) for small-scale preparations. All plasmid DNA preparations were digested with the EcoRI restriction endonuclease to ensure the presence of the approximately 380 bp AP-PCR insert into the plasmid. Subsequently, a large-scale and highly purified plasmid DNA preparation was performed from two selected clones shown to carry the AP-PCR insert by using the QIAGEN plasmid purification kit (midi format). These large-scale plasmid preparations were used for automated DNA sequencing.

[0315] The 380 bp nucleotide sequence was determined for three strains of S. saprophyticus (SEQ ID NOs. 74, 1093, and 1198). Both strands of the AP-PCR insert from the two selected clones were sequenced by the dideoxynucleotide chain termination sequencing method with SP6 and T7 sequencing primers by using the Applied Biosystems automated DNA sequencer (model 373A) with their PRISM™ Sequenase® Terminator Double-stranded DNA Sequencing Kit (Applied Biosystems, Foster City, Calif.).

[0316] Optimal species-specific amplification primers (SEQ ID NOs. 1208 and 1209) have been selected from the sequenced AP-PCR Staphylococcus saprophyticus DNA fragments with the help of the primer analysis software Oligo™ 5.0 (National BioSciences Inc.). The selected primers were tested in PCR assays to verify their specificity and ubiquity. Data obtained with DNA preparations from reference ATCC strains of 49 gram-positive and 31 gram-negative bacterial species, including 28 different staphylococcal species, indicate that the selected primer pairs are specific for Staphylococcus saprophyticus since no amplification signal has been observed with DNAs from the other staphylococcal or bacterial species tested. This assay was able to amplify efficiently DNA from all 60 strains of S. saprophyticus from various origins tested. The sensitivity level achieved for three S. saprophyticus reference ATCC strains was around 6 genome copies.

### Example 26

### Sequencing of Prokaryotic tuf Gene Fragments

[0317] The comparison of publicly available tuf sequences from a variety of bacterial species revealed conserved regions, allowing the design of PCR primers able to amplify tuf sequences from a wide range of bacterial species. Using primer pair SEQ ID NOs. 664 and 697, it was possible to amplify and determine tuf sequences SEQ ID NOs.: 1-73, 75-241, 607-618, 621, 662, 675, 717-736, 868-888, 932, 967-989, 992, 1002, 1572-1575, 1662-1663, 1715-1733, 1835-1837, 1877-1878, 1880-1881, 2183, 2185, 2200, 2201, and 2270-2272.

### Example 27

### Sequencing of Procaryotic recA Gene Fragments

[0318] The comparison of publicly available recA sequences from a variety of bacterial species revealed conserved regions, allowing the design of PCR primers able to amplify recA sequences from a wide range of bacterial species. Using primer pairs SEQ ID NOs. 921-922 and 1605-1606, it was possible to amplify and determine recA sequences SEQ ID NOs.: 990-991, 1003, 1288-1289, 1714, 1756-1763, 1866-1873 and 2202-2212.

### Example 28

### Specific Detection and Identification of Escherichia coli/Shigella sp. Using tuf Sequences

[0319] The analysis of tuf sequences from a variety of bacterial species allowed the selection of PCR primers (SEQ ID NOs. 1661 and 1665) and of an internal probe (SEQ ID NO. 2168) specific to Escherichia coli/Shigella sp. The strategy used to design the PCR primers was based on the analysis of a multiple sequence alignment of various tuf sequences. The multiple sequence alignment included the tuf sequences of Escherichia coli/Shigella sp. as well as tuf sequences from other species and bacterial genera, especially representatives of closely related species. A careful analysis of this alignment allowed the selection of oligonucleotide sequences which are conserved within the target species but which discriminate sequences from other species, especially from the closely related species, thereby permitting the species-specific and ubiquitous detection and identification of the target bacterial species.

[0320] The chosen primer pair, oligos SEQ ID NOs. 1661 and 1665, gives an amplification product of 219 bp. Standard PCR was carried out using 0.4 μM of each primer, 2.5 mM MgCl₂, BSA 0.05 mM, 50 mM KCl, 10 mM Tris-HCl (pH 9.0), 0.1% Triton X-100, dNTPs 0.2 mM (Pharmacia), 0.5 U Taq DNA polymerase (Promega) coupled with TaqStart™ antibody (Clontech Laboratories Inc.), 1 μl of genomic DNA sample in a final volume of 20 μl using a PTC-200 thermocycler (MJ Research). The optimal cycling conditions for maximum sensitivity and specificity were 3 minutes at 95° C. for initial denaturation, then forty cycles of two steps consisting of 1 second at 95° C. and 30 seconds at 60° C., followed by terminal extension at 72° C. for 2 minutes. Detection of the PCR products was made by electrophoresis in agarose gels (2%) containing 0.25 μg/ml of ethidium bromide. Visualization of the PCR products was made under UV at 254 nm.

[0321] Specificity of the assay was tested by adding to the PCR reactions 0.1 ng of genomic DNA from each of the following bacterial species: Escherichia coli (7 strains), Shigella sonnei, Shigella flexneri, Shigella dysenteriae, Salmonella typhimyurium, Salmonella typhi, Salmonella enteritidis, Tatumella ptyseos, Klebsiella pneumoniae (2 strains), Enterobacter aerogenes, Citrobacter farmeri, Campylobacter jejuni, Serratia marcescens. Amplification was observed only for the Escherichia coli and Shigella sp. strains listed and Escherichia fergusonii. The sensitivity of the assay with 40-cycle PCR was verified with one strain of E. coli and three strains of Shigella sp. The detection limit for E. coli and Shigella sp. was 1 to 10 copies of genomic DNA, depending on the strains tested.

### Example 29

### Specific Detection and Identification of Klebsiella pneumoniae Using atpD Sequences

[0322] The analysis of atpD sequences from a variety of bacterial species allowed the selection of PCR primers specific to K. pneumoniae. The primer design strategy is similar to the strategy described in Example 28 except that atpD sequences were used in the alignment.

[0323] Two K. pneumoniae-specific primers were selected, (SEQ ID NOs. 1331 and 1332) which give an amplification product of 115 bp. Standard PCR was carried out on PTC-200 thermocyclers (MJ Research) using 0.4 μM of each primer as described in Example 28. The optimal cycling conditions for maximum sensitivity and specificity were as follow: three minutes at 95° C. for initial denaturation, then forty cycles of two steps consisting of 1 second at 95° C. and 30 seconds at 55° C., followed by terminal extension at 72° C. for 2 minutes.

[0324] Specificity of the assay was tested by adding to the PCR reactions 0.1 ng of genomic DNA from each of the following bacterial species: Klebsiella pneumoniae (2 strains), Klebsiella ornitholytica, Klebsiella oxytoca (2 strains), Klebsiella planticola, Klebsiella terrigena, Citrobacter freundii, Escherichia coli, Salmonella cholerasuis typhi, Serratia marcescens, Enterobacter aerogenes, Proteus vulgaris, Kluyvera ascorbata, Kluyvera georgiana, Kluyvera cryocrescens and Yersinia enterolitica. Amplification was detected for the two K. pneumoniae strains, K. planticola, K. terrigena and the three Kluyvera species tested. Analysis of the multiple alignment sequence of the atpD gene allowed the design of an internal probe SEQ ID NO. 2167 which can discrimate Klebsiella pneumoniae from other Klebsiella sp. and Kluyvera sp. The sensitivity of the assay with 40-cycle PCR was verified with one strain of K. pneumoniae. The detection limit for K. pneumoniae was around 10 copies of genomic DNA.

### Example 30

### Specific Detection and Identification of Acinetobacter baumannii Using atpD Sequences

[0325] The analysis of atpD sequences from a variety of bacterial species allowed the selection of PCR primers specific to Acinetobacter baumannii. The primer design strategy is similar to the strategy described in Example 28.

[0326] Two A. baumannii-specific primers were selected, SEQ ID NOs. 1690 and 1691, which give an amplification product of 233 bp. Standard PCR was carried out on PTC-200 thermocyclers (MJ Research) using 0.4 μM of each primer as described in Example 28. The optimal cycling conditions for maximum sensitivity and specificity were as follow: three minutes at 95° C. for initial denaturation, then forty cycles of two steps consisting of 1 second at 95° C. and 30 seconds at 60° C., followed by terminal extension at 72° C. for 2 minutes.

[0327] Specificity of the assay was tested by adding to the PCR reactions 0.1 ng of genomic DNA from each of the following bacterial species: Acinetobacter baumannii (3 strains), Acinetobacter anitratus, Acinetobacter lwoffi, Serratia marcescens, Enterobacter cloacae, Enterococcus faecalis, Pseudomonas aeruginosa, Psychrobacter phenylpyruvicus, Neisseria gonorrheoae, Haemophilus haemoliticus, Yersinia enterolitica, Proteus vulgaris, Eikenella corrodens, Escherichia coli. Amplification was detected only for A. baumannii, A. anitratus and A. lwoffi. The sensitivity of the assay with 40-cycle PCR was verified with two strains of A. baumannii. The detection limit for the two A. baumannii strains tested was 5 copies of genomic DNA. Analysis of the multiple alignment sequence of the atpD gene allowed the design of a A. baumannii-specific internal probe (SEQ ID NO. 2169).

### Example 31

### Specific Detection and Identification of Neisseria gonorrhoeae Using tuf Sequences

[0328] The analysis of tuf sequences from a variety of bacterial species allowed the selection of PCR primers specific to Neisseria gonorrhoeae. The primer design strategy is similar to the strategy described in Example 28.

[0329] Two N. gonorrhoeae-specific primers were selected, SEQ ID NOs. 551 and 552, which give an amplification product of 139 bp. PCR amplification was carried out on PTC-200 thermocyclers (MJ Research) using 0.4 μM of each primer as described in Example 28. The optimal cycling conditions for maximum sensitivity and specificity were as follow: three minutes at 95° C. for initial denaturation, then forty cycles of two steps consisting of 1 second at 95° C. and 30 seconds at 65° C., followed by terminal extension at 72° C. for 2 minutes.

[0330] Specificity of the assay was tested by adding into the PCR reactions, 0.1 ng of genomic DNA from each of the following bacterial species: Neisseria gonorrhoeae (19 strains), Neisseria meningitidis (2 strains), Neisseria lactamica, Neisseria flavescens, Neisseria animalis, Neisseria canis, Neisseria cuniculi, Neisseria elongata, Neisseria mucosa, Neisseria polysaccharea, Neisseria sicca, Neisseria subflava, Neisseria weaveri. Amplification was detected only for N. gonorrhoeae, N. sicca and N. polysaccharea. The sensitivity of the assay with 40-cycle PCR was verified with two strains of N. gonorrhoeae. The detection limit for the N. gonorrhoeae strains tested was 5 copies of genomic DNA. Analysis of the multiple alignment sequence of the tuf gene allowed the design of an internal probe, SEQ ID NO. 2166, which can discriminate N. gonorrhoeae from N. sicca and N. polysaccharea.

### Example 32

### Sequencing of Bacterial gyrA and parC Gene Fragments. Sequencing of Bacterial gyrA and parC Fragments

[0331] One of the major mechanism of resistance to quinolone in various bacterial species is mediated by target changes (DNA gyrase and/or topoisomerase IV). These enzymes control DNA topology and are vital for chromosome function and replication. Each of these enzymes is a tetramer composed of two subunits: GyrA and GyrB forming A₂B2 complex in DNA gyrase; and ParC and ParE forming and C₂E₂ complex in DNA topoisomerase IV. It has been shown that they are hotspots, called the quinolone-resistance-determining region (QRDR) for mutations within gyrA that encodes for the GyrA subunit of DNA gyrase and within parC that encodes the parC subunit of topoisomerase IV.

[0332] In order to generate a database for gyrA and parC sequences that can be used for design of primers and/or probes for the specific detection of quinolone resistance in various bacterial species, gyrA and parC DNA fragments selected from public database (GenBanK and EMBL) from a variety of bacterial species were used to design oligonucleotide primers.

[0333] Using primer pair SEQ ID NOs. 1297 and 1298, it was possible to amplify and determine gyrA sequences from Klebsiella oxytoca (SEQ ID NO. 1764), Klebsiella pneumoniae subsp. ozaneae (SEQ ID NO. 1765), Klebsiella planticola (SEQ ID NO. 1766), Klebsiella pneumoniae (SEQ ID NO. 1767), Klebsiella pneumoniae subsp. pneumoniae (two strains) (SEQ ID NOs. 1768-1769), Klebsiella pneumoniae subsp. rhinoscleromatis (SEQ ID NO. 1770), Klebsiella terrigena (SEQ ID NO. 1771), Kluyvera ascorbata (SEQ ID NO. 2013), Kluyvera georgiana (SEQ ID NO. 2014) and Escherichia coli (4 strains) (SEQ ID NOs. 2277-2280). Using primer pair SEQ ID NOs. 1291 and 1292, it was possible to amplify and determine gyrA sequences from Legionella pneumophila subsp. pneumophila (SEQ ID NO. 1772), Proteus mirabilis (SEQ ID NO. 1773), Providencia rettgeri (SEQ ID NO. 1774), Proteus vulgaris (SEQ ID NO. 1775) and Yersinia enterolitica (SEQ ID NO. 1776). Using primer pair SEQ ID NOs. 1340 and 1341, it was possible to amplify and determine gyrA sequence from Staphylococcus aureus (SEQ ID NO. 1255).

[0334] Using primers SEQ ID NOs. 1318 and 1319, it was possible to amplify and determine parC sequences from K. oxytoca (two strains) (SEQ ID NOs. 1777-1778), Klebsiella pneumoniae subsp. ozaenae (SEQ ID NO. 1779), Klebsiella planticola (SEQ ID NO. 1780), Klebsiella pneumoniae (SEQ ID NO. 1781), Klebsiella pneumoniae subsp. pneumoniae (two strains) (SEQ ID NOs. 1782-1783), Klebsiella pneumoniae subsp. rhinoscleromatis (SEQ ID NO. 1784) and Klebsiella terrigena (SEQ ID NO. 1785).

### Example 33

### Development of a PCR Assay for the Specific Detection and Identification of Staphylococcus aureus and its Quinolone Resistance Genes gyrA and parC

[0335] The analysis of gyrA and parC sequences from a variety of bacterial species revealed conserved regions allowing the design of PCR primers specific to the quinolone-resistance-determining region (QRDR) of gyrA and parC from Staphylococcus aureus. PCR primer pair SEQ ID NOs. 1340 and 1341 was designed to amplify the gyrA sequence of S. aureus, whereas PCR primer pair SEQ ID NOs. 1342 and 1343 was designed to amplify S. aureus parC. The comparison of gyrA and parC sequences from S. aureus strains with various levels of quinolone resistance allowed the identification of amino acid substitutions Ser-84 to Leu, Glu-88 to Gly or Lys in the GyrA subunit of DNA gyrase encoded by gyrA and amino acid changes Ser-80 to Phe or Tyr and Ala-116 to Glu in the ParC subunit of topoisomerase IV encoded by parC. These amino acid substitutions in GyrA and ParC subunits occur in isolates with intermediate- or high-level quinolone resistance. Internal probes for the specific detection of wild-type S. aureus gyrA (SEQ ID NO. 1940) and wild-type S. aureus parC (SEQ ID NO. 1941) as well as internal probes for the specific detection of each of the gyrA (SEQ ID NOs. 1333-1335) and parC mutations identified in quinolone-resistant S. aureus (SEQ ID NOs. 1336-1339) were designed.

[0336] The gyrA- and parC-specific primer pairs (SEQ ID NOs. 1340-1341 and SEQ ID NOs. 1342-1343) were used in multiplex. PCR amplification was carried out on PTC-200 thermocyclers (MJ Research) using 0.3, 0.3, 0.6 and 0.6 μM of each primers, respectively, as described in Example 28. The optimal cycling conditions for maximum sensitivity and specificity were 3 minutes at 95° C. for initial denaturation, then forty cycles of two steps consisting of 1 second at 95° C. and 30 seconds at 62° C., followed by terminal extension at 72° C. for 2 minutes. Detection of the PCR products was made by electrophoresis in agarose gels (2%) containing 0.25 μg/ml of ethidium bromide. The specificity of the multiplex assay with 40-cycle PCR was verified by using 0.1 ng of purified genomic DNA from a panel of gram-positive bacteria. The list included the following: Abiotrophia adiacens, Abiotrophia defectiva, Bacillus cereus, Bacillus mycoides, Enterococcus faecalis (2 strains), Enterococcus flavescens, Gemella morbillorum, Lactococcus lactis, Listeria innocua, Listeria monocytogenes, Staphylococcus aureus (5 strains), Staphylococcus auricalis, Staphylococcus capitis subsp. urealyticus, Staphylococcus carnosus, Staphylococcus chromogenes, Staphylococcus epidermidis (3 strains), Staphylococcus gallinarum, Staphylococcus haemolyticus (2 strains), Staphylococcus hominis, Staphylococcus hominis subsp hominis, Staphylococcus lentus, Staphylococcus lugdunensis, Staphylococcus saccharolyticus, Staphylococcus saprophyticus (3 strains), Staphylococcus simulans, Staphylococcus warneri, Staphylococcus xylosus, Streptococcus agalactiae, Streptococcus pneumoniae. Strong amplification of both gyrA and parC genes was only detected for the S. aureus strains tested. The sensitivity of the multiplex assay with 40-cycle PCR was verified with one quinolone-sensitive and four quinolone-resistant strains of S. aureus. The detection limit was 2 to 10 copies of genomic DNA, depending on the strains tested.

[0337] Detection of the hybridization with the internal probes was performed as described in Example 7. The internal probes specific to wild-type gyrA and parC of S. aureus and to the gyrA and parC variants of S. aureus were able to recognize two quinolone-resistant and one quinolone-sensitive S. aureus strains showing a perfect correlation with the susceptibility to quinolones.

[0338] The complete assay for the specific detection of S. aureus and its susceptibility to quinolone contains the Staphylococcus-specific primers (SEQ ID NOs. 553 and 575) described in Example 7 and the multiplex containing the S. aureus gyrA- and parC-specific primer pairs (SEQ ID NOs. 1340-1341 and SEQ ID NOs. 1342-1343). Amplification is coupled with post-PCR hybridization with the internal probe specific to S. aureus (SEQ ID NO. 587) described in Example 7 and the internal probes specific to wild-type S. aureus gyrA and parC (SEQ ID NOs. 1940-1941) and to the S. aureus gyrA and parC variants (SEQ ID NOs. 1333-1338).

[0339] An assay was also developed for the detection of quinolone-resistant S. aureus using the SmartCycler (Cepheid). Real-time detection is based on the use of S. aureus parC-specific primers (SEQ ID NOs. 1342 and 1343) and the Staphylococcus-specific primers (SEQ ID NOs. 553 and 575) described in Example 7. Internal probes were designed for molecular beacon detection of the wild-type S. aureus parC (SEQ ID NO. 1939), for detection of the Ser-80 to Tyr or Phe amino acid substitutions in the ParC subunit encoded by S. aureus parC (SEQ ID NOs. 1938 and 1955) and for detection of S. aureus (SEQ ID NO. 2282).

### Example 34

### Development of a PCR Assay for the Detection and Identification of Klebsiella pneumoniae and its Quinolone Resistance Genes gyrA and parC

[0340] The analysis of gyrA and parC sequences from a variety of bacterial species from the public databases and from the database described in Example 32 revealed conserved regions allowing the design of PCR primers specific to the quinolone-resistance-determining region (QRDR) of gyrA and parC from K. pneumoniae. PCR primer pair SEQ ID NOs. 1936 and 1937, or pair SEQ ID NOs. 1937 and 1942, were designed to amplify the gyrA sequence of K. pneumoniae, whereas PCR primer pair SEQ ID NOs. 1934 and 1935 was designed to amplify K. pneumoniae parC sequence. An alternative pair, SEQ ID NOs. 1935 and 1936, can also amplify K. pneumoniae parC. The comparison of gyrA and parC sequences from K. pneumoniae strains with various levels of quinolone resistance allowed the identification of amino acid substitutions Ser-83 to Tyr or Phe and Asp-87 to Gly or Ala and Asp-87 to Asn in the GyrA subunit of DNA gyrase encoded by gyrA and amino acid changes Ser-80 to Ile or Arg and Glu-84 to Gly or Lys in the ParC subunit of topoisomerase IV encoded by parC. These amino acid substitutions in the GyrA and ParC subunits occur in isolates with intermediate- or high-level quinolone resistance. Internal probes for the specific detection of wild-type K. pneumoniae gyrA (SEQ ID NO. 1943) and wild-type K. pneumoniae parC (SEQ ID NO. 1944) as well as internal probes for the specific detection of each of the gyrA (SEQ ID NOs. 1945-1949) and parC mutations identified in quinolone-resistant K. pneumoniae (SEQ ID NOs. 1950-1953) were designed.

[0341] Two multiplex using the K. pneumoniae gyrA- and parC-specific primer pairs were used: the first multiplex contained K. pneumoniae gyrA-specific primers (SEQ ID NOs. 1937 and 1942) and K. pneumoniae parC-specific primers (SEQ ID NOs. 1934 and 1935) and the second multiplex contained K. pneumoniae gyrA/parC-specific primer (SEQ ID NOs. 1936), K. pneumoniae gyrA-specific primer (SEQ ID NO. 1937) and K. pneumoniae parC-specific primer (SEQ ID NO. 1935). Standard PCR was carried out on PTC-200 thermocyclers (MJ Research) using for the first multiplex 0.6, 0.6, 0.4, 0.4 μM of each primer, respectively, and for the second multiplex 0.8, 0.4, 0.4 μM of each primer, respectively. PCR amplification and agarose gel electrophoresis of the amplified products were performed as described in Example 28. The optimal cycling conditions for maximum sensitivity and specificity were 3 minutes at 95° C. for initial denaturation, then forty cycles of two steps consisting of 1 second at 95° C. and 30 seconds at 62° C., followed by terminal extension at 72° C. for 2 minutes. The specificity of the two multiplex assays with 40-cycle PCR was verified by using 0.1 ng of purified genomic DNA from a panel of gram-negative bacteria. The list included: Acinetobacter baumannii, Citrobacter freundii, Eikenella corrodens, Enterobacter aerogenes, Enterobacter cancerogenes, Enterobacter cloacae, Escherichia coli (10 strains), Haemophilus influenzae, Klebsiella pneumoniae, Klebsiella ornitholytica, Klebsiella oxytoca (2 strains), Klebsiella planticola, Klebsiella terrigena, Kluyvera ascorbata, Kluyvera cryocrescens, Kluyvera georgiana, Neisseria gonorrhoeae, Proteus mirabilis, Proteus vulgaris, Pseudomonas aeruginosa, Salmonella choleraesuis subsp. typhimurium, Salmonella enteritidis, Serratia liquefaciens, Serratia marcescens and Yersinia enterocolytica. For both multiplex, strong amplification of both gyrA and parC was observed only for the K. pneumoniae strain tested. The sensitivity of the two multiplex assays with 40-cycle PCR was verified with one quinolone-sensitive strain of K. pneumoniae. The detection limit was around 10 copies of genomic DNA.

[0342] The complete assay for the specific detection of K. pneumoniae and its susceptibility to quinolone contains the Klebsiella-specific primers (SEQ ID NOs. 1331 and 1332) described in Example 29 and either the multiplex containing the K. pneumoniae gyrA- and parC-specific primers (SEQ ID NOs. 1935, 1936, 1937) or the multiplex containing the K. pneumoniae gyrA- and parC-specific primers (SEQ ID NOs. 1934, 1937, 1939, 1942). Amplification is coupled with post-PCR hybridization with the internal probe specific to K. pneumoniae (SEQ ID NO. 2167) described in Example 29 and the internal probes specific to wild-type K. pneumoniae gyrA and parC (SEQ ID NOs. 1943, 1944) and to the K. pneumoniae gyrA and parC variants (SEQ ID NOs. 1945-1949 and 1950-1953).

[0343] An assay was also developed for the detection of quinolone-resistant K. pneumoniae using the SmartCycler (Cepheid). Real-time detection is based on the use of resistant K. pneumoniae gyrA-specific primers (SEQ ID NOs. 1936 and 1937) and the K. pneumoniae-specific primers (SEQ ID NOs. 1331 and 1332) described in Example 29. Internal probes were designed for molecular beacon detection of the wild-type K. pneumoniae gyrA (SEQ ID NO. 2251), for detection of the Ser-83 to Tyr or Phe and/or Asp-87 to Gly or Asn in the GyrA subunit of DNA gyrase encoded by gyrA (SEQ ID NOs. 2250) and for detection of K. pneumoniae (SEQ ID NO. 2281).

### Example 35

### Development of a PCR Assay for Detection and Identification of S. pneumoniae and its Quinolone Resistance Genes gyrA and parC

[0344] The analysis of gyrA and parC sequences from a variety of bacterial species revealed conserved regions allowing the design of PCR primers able to amplify the quinolone-resistance-determining region (QRDR) of gyrA and parC from all S. pneumoniae strains. PCR primer pair SEQ ID NOs. 2040 and 2041 was designed to amplify the QRDR of S. pneumoniae gyrA, whereas PCR primer pair SEQ ID NOs. 2044 and 2045 was designed to amplify the QRDR of S. pneumoniae parC. The comparison of gyrA and parC sequences from S. pneumoniae strains with various levels of quinolone resistance allowed the identification of amino acid substitutions Ser-81 to Phe or Tyr in the GyrA subunit of DNA gyrase encoded by gyrA and amino acid changes Ser-79 to Phe in the ParC subunit of topoisomerase IV encoded by parC. These amino acid substitutions in the GyrA and ParC subunits occur in isolates with intermediate- or high-level quinolone resistance. Internal probes for the specific detection of each of the gyrA (SEQ ID NOs. 2042 and 2043) and parC (SEQ ID NO. 2046) mutations identified in quinolone-resistant S. pneumoniae were designed.

[0345] For all bacterial species, amplification was performed from purified genomic DNA. 1 μl of genomic DNA at 0.1 ng/μL was transferred directly to a 19 μl PCR mixture. Each PCR reaction contained 50 mM KCl, 10 mM Tris-HCl (pH 9.0), 0.1% Triton X-100, 2.5 mM MgCl₂, 0.4 μM (each) of the above primers SEQ ID NOs. 2040, 2041, 2044 and 2045, 0.05 mM bovine serum albumin (BSA) and 0.5 U Taq polymerase coupled with TaqStart™ antibody. The optimal cycling conditions for maximum sensitivity and specificity were 3 minutes at 95° C. for initial denaturation, then forty cycles of two steps consisting of 1 second at 95° C. and 30 seconds at 58° C., followed by terminal extension at 72° C. for 2 minutes. In order to generate Digoxigenin (DIG)-labeled amplicons for capture probe hybridization, 0.1×PCR DIG labeling four deoxynucleoside triphosphates mix (Boehringer Mannheim GmbH) was used for amplification.

[0346] The DIG-labeled amplicons were hybridized to the capture probes bound to 96-well plates. The plates were incubated with anti-DIG-alkaline phosphatase and the chemiluminescence was measured by using a luminometer (MLX, Dynex Technologies Inc.) after incubation with CSPD and recorded as Relative Light Unit (RLU). The RLU ratio of tested sample with and without captures probes was then calculated. A ratio ≧2.0 was defined as a positive hybridization signal. All reactions were performed in duplicate.

[0347] The specificity of the multiplex assay with 40-cycle PCR was verified by using 0.1 ng of purified genomic DNA from a panel of bacteria listed in Table 13. Strong amplification of both gyrA and parC was detected only for the S. pneumoniae strains tested. Weak amplification of both gyrA and parC genes was detected for Staphylococcus simulans. The detection limit tested with purified genomic DNA from 5 strains of S. pneumoniae was 1 to 10 genome copies. In addition, 5 quinolone-resistant and 2 quinolone-sensitive clinical isolates of S. pneumoniae were tested to further validate the developed multiplex PCR coupled with capture probe hybridization assays. There was a perfect correlation between detection of S. pneumoniae gyrA and parC mutations and the susceptibility to quinolone.

[0348] The complete assay for the specific detection of S. pneumoniae and its susceptibility to quinolone contains the S. pneumoniae-specific primers (SEQ ID NOs. 1179 and 1181) described in Example 20 and the multiplex containing the S. pneumoniae gyrA-specific and parC-specific primer pairs (SEQ ID NOS. 2040 and 2041 and SEQ ID NOs. 2044 and 2045). Amplification is coupled with post-PCR hybridization with the internal probe specific to S. pneumoniae (SEQ ID NO. 1180) described in Example and the internal probes specific to each of the S. pneumoniae gyrA and parC variants (SEQ ID NOs. 2042, 2043 and 2046).

### Example 36

### Detection of Extended-Spectrum TEM-Type β-Lactamases in Escherichia coli

[0349] The analysis of TEM sequences which confer resistance to third-generation cephalosporins and to β-lactamase inhibitors allowed the identification of amino acid substitutions Met-69 to Ile or Leu or Val, Ser-130 to Gly, Arg-164 to Ser or His, Gly-238 to Ser, Glu-240 to Lys and Arg-244 to Ser or Cys or Thr or His or Leu. PCR primers SEQ ID NOs. 1907 and 1908 were designed to amplify TEM sequences. Internal probes for the specific detection of wild-type TEM (SEQ ID NO. 2141) and for each of the amino acid substitutions (SEQ ID NOs. 1909-1926) identified in TEM variants were designed to detect resistance to third-generation cephalosporins and to β-lactamase inhibitors. Design and synthesis of primers and probes, and detection of the hybridization were performed as described in Example 7.

[0350] For all bacterial species, amplification was performed from purified genomic DNA. One μl of genomic DNA at 0.1 ng/μl was transferred directly to a 19 μl PCR mixture. Each PCR reaction contained 50 mM KCl, 10 mM Tris-HCl (pH 9.0); 0.1% Triton X-100, 2.5 mM MgCl₂, 0.4 μM of the TEM-specific primers SEQ ID NOs. 1907 and 1908, 200 μM (each) of the four deoxynucleoside triphosphates, 0.05 mM bovine serum albumin (BSA) and 0.5 U Taq polymerase (Promega) coupled with TaqStart™ antibody. PCR amplification and agarose gel analysis of the amplified products were performed as described in Example 28. The optimal cycling conditions for maximum sensitivity and specificity were 3 minutes at 95° C. for initial denaturation, then forty cycles of three steps consisting of 5 seconds at 95° C., 30 seconds at 55° C. and 30 seconds at 72° C., followed by terminal extension at 72° C. for 2 minutes.

[0351] The specificity of the TEM-specific primers with 40-cycle PCR was verified by using 0.1 ng of purified genomic from the following bacteria: three third-generation cephalosporin-resistant Escherichia coli strains (one with TEM-10, one with TEM-28 and the other with TEM-49), two third-generation cephalosporin-sensitive Escherichia coli strain (one with TEM-1 and the other without TEM), one third-generation cephalosporin-resistant Klebsiella pneumoniae strain (with TEM-47), and one β-lactamase-inhibitor-resistant Proteus mirabilis strain (with TEM-39). Amplification with the TEM-specific primers was detected only for strains containing TEM.

[0352] The sensitivity of the assay with 40-cycle PCR was verified with three E. coli strains containing TEM-1 or TEM-10 or TEM-49, one K. pneumoniae strain containing TEM-47 and one P. mirabilis strain containing TEM-39. The detection limit was 5 to 100 copies of genomic DNA, depending on the TEM-containing strains tested.

[0353] The TEM-specific primers SEQ ID NOs. 1907 and 1908 were used in multiplex with the Escherichia coli/Shigella sp.-specific primers SEQ ID NOs. 1661 and 1665 described in Example 28 to allow the complete identification of Escherichia coli/Shigella sp. and the susceptibility to β-lactams. PCR amplification with 0.4 μM of each of the primers and agarose gel analysis of the amplified products was performed as described above.

[0354] The specificity of the multiplex with 40-cycle PCR was verified by using 0.1 ng of purified genomic DNA from the following bacteria: three third-generation cephalosporin-resistant Escherichia coli strains (one with TEM-10, one with TEM-28 and the other with TEM-49), two third-generation cephalosporin-sensitive Escherichia coli strain (one with TEM-1 and the other without TEM), one third-generation cephalosporin-resistant Klebsiella pneumoniae strain (with TEM-47), and one β-lactamase-inhibitor-resistant Proteus mirabilis strain (with TEM-39). The multiplex was highly specific to Escherichia coli strains containing TEM.

[0355] The complete assay for detection of TEM-type β-lactamases in E. coli includes PCR amplification using the multiplex containing the TEM-specific primers (SEQ ID NOs. 1907 and 1908) and the Escherichia coli/Shigella sp.-specific primers (SEQ ID NOs. 1661 and 1665) coupled with post PCR-hybridization with the internal probes specific to wild-type TEM (SEQ ID NO. 2141) and to the TEM variants (SEQ ID NOs. 1909-1926).

### Example 37

### Detection of Extended-Spectrum SHV-Type β-Lactamases in Klebsiella pneumoniae

[0356] The comparison of SHV sequences, which confer resistance to third-generation cephalosporins and to β-lactamase inhibitors, allowed the identification of amino acid substitutions Ser-130 to Gly, Asp-179 to Ala or Asn, Gly-238 to Ser, and Glu-240 to Lys. PCR primer pair SEQ ID NOs. 1884 and 1885 was designed to amplify SHV sequences. Internal probes for the specific identification of wild-type SHV (SEQ ID NO. 1896) and for each of the amino acid substitutions (SEQ ID NOs. 1886-1895 and 1897-1898) identified in SHV variants were designed to detect resistance to third-generation cephalosporins and to β-lactamase inhibitors. Design and synthesis of primers and probes, and detection of the hybridization were performed as described in Example 7.

[0357] For all bacterial species, amplification was performed from purified genomic DNA. One μl of genomic DNA at 0.1 ng/μl was transferred directly to a 19 μl PCR mixture. Each PCR reaction contained 50 mM KCl, 10 mM Tris-HCl (pH 9.0), 0.1% Triton X-100, 2.5 mM MgCl₂, 0.4 μM of the SHV-specific primers SEQ ID NO. 1884 and 1885, 200 μM (each) of the four deoxynucleoside triphosphates, 0.05 mM bovine serum albumin (BSA) and 0.5 U Taq polymerase (Promega) coupled with TaqStart™ antibody. PCR amplification and agarose gel analysis of the amplified products were performed as described in Example 28. The optimal cycling conditions for maximum sensitivity and specificity were 3 minutes at 95° C. for initial denaturation, then forty cycles of three steps consisting of 5 seconds at 95° C., 30 seconds at 55° C. and 30 seconds at 72° C., followed by terminal extension at 72° C. for 2 minutes.

[0358] The specificity of the SHV-specific primers with 40-cycle PCR was verified by using 0.1 ng of purified genomic from the following bacteria: two third-generation cephalosporin-resistant Klebsiella pneumoniae strains (one with SHV-2a and the other with SHV-12), one third-generation cephalosporin-sensitive Klebsiella pneumoniae strain (with SHV-1), two third-generation cephalosporin-resistant Escherichia coli strains (one with SHV-8 and the other with SHV-7), and two third-generation cephalosporin-sensitive Escherichia coli strains (one with SHV-1 and the other without any SHV). Amplification with the SHV-specific primers was detected only for strains containing SHV.

[0359] The sensitivity of the assay with 40-cycle PCR was verified with four strains containing SHV. The detection limit was 10 to 100 copies of genomic DNA, depending on the SHV-containing strains tested.

[0360] The amplification was coupled with post-PCR hybridization with the internal probes specific for identification of wild-type SHV (SEQ ID NO. 1896) and for each of the amino acid substitutions (SEQ ID NOs. 1886-1895 and 1897-1898) identified in SHV variants. The specificity of the probes was verified with six strains containing various SHV enzymes, one Klebsiella pneumoniae strain containing SHV-1, one Klebsiella pneumoniae strain containing SHV-2a, one Klebsiella pneumoniae strain containing SHV-12, one Escherichia coli strain containing SHV-1, one Escherichia coli strain containing SHV-7 and one Escherichia coli strain containing SHV-8. The probes correctly detected each of the SHV genes and their specific mutations. There was a perfect correlation between the SHV genotype of the strains and the susceptibility to β-lactam antibiotics.

[0361] The SHV-specific primers SEQ ID NOs. 1884 and 1885 were used in multiplex with the K. pneumoniae-specific primers SEQ ID NOs. 1331 and 1332 described in Example 29 to allow the complete identification of K. pneumoniae and the susceptibility to β-lactams. PCR amplification with 0.4 μM of each of the primers and agarose gel analysis of the amplified products were performed as described above.

[0362] The specificity of the multiplex with 40-cycle PCR was verified by using 0.1 ng of purified genomic DNA from the following bacteria: three K. pneumoniae strains containing SHV-1, one Klebsiella pneumoniae strain containing SHV-2a, one Klebsiella pneumoniae strain containing SHV-12, one K. rhinoscleromatis strain containing SHV-1, one Escherichia coli strain without SHV. The multiplex was highly specific to Klebsiella pneumoniae strain containing SHV.

### Example 38

### Development of a PCR Assay for the Detection and Identification of Neisseria gonorrhoeae and its Associated Tetracycline Resistance Gene tetM

[0363] The analysis of publicly available tetM sequences revealed conserved regions allowing the design of PCR primers specific to tetM sequences. The PCR primer pair SEQ ID NOs. 1588 and 1589 was used in multiplex with the Neisseria gonorrhoeae-specific primers SEQ ID NOs. 551 and 552 described in Example 31. Sequence alignment analysis of tetM sequences revealed regions suitable for the design of an internal probe specific to tetM (SEQ ID NO. 2254). PCR amplification was carried out on PTC-200 thermocyclers (MJ Research) using 0.4 μM of each primer pair as described in Example 28. The optimal cycling conditions for maximum sensitivity and specificity were as follow: three minutes at 95° C. for initial denaturation, then forty cycles of two steps consisting of 1 second at 95° C. and 30 seconds at 60° C., followed by terminal extension at 72° C. for 2 minutes.

[0364] The specificity of the multiplex PCR assay with 40-cycle PCR was verified by using 0.1 ng of purified genomic DNA from the following bacteria: two tetracycline-resistant Escherichia coli strains (one containing the tetracycline-resistant gene tetB and the other containing the tetracycline-resistant gene tetC), one tetracycline-resistant Pseudomonas aeruginosa strain (containing the tetracycline-resistant gene tetA), nine tetracycline-resistant Neisseria gonorrhoeae strains, two tetracycline-sensitive Neisseria meningitidis strains, one tetracycline-sensitive Neisseria polysaccharea strain, one tetracycline-sensitive Neisseria sicca strain and one tetracycline-sensitive Neisseria subflava strain. Amplification with both the tetM-specific and Neisseria gonorrhoeae-specific primers was detected only for N. gonorrhoeae strains containing tetM. There was a weak amplification signal using Neisseria gonorrhoeae-specific primers for the following species: Neisseria sicca, Neisseria polysaccharea and Neisseria meningitidis. There was a perfect correlation between the tetM genotype and the tetracycline susceptibility pattern of the Neisseria gonorrhoeae strains tested. The internal probe specific to N. gonorrhoeae SEQ ID NO. 2166 described in Example 31 can discriminate Neisseria gonorrhoeae from the other Neisseria sp.

[0365] The sensitivity of the assay with 40-cycle PCR was verified with two tetracycline resistant strains of N. gonorrhoeae. The detection limit was 5 copies of genomic DNA for both strains.

### Example 39

### Development of a PCR Assay for the Detection and Identification of Shigella sp. and their Associated Trimethoprim Resistance Gene dhfrIa

[0366] The analysis of publicly available dhfrIa and other dhfr sequences revealed regions allowing the design of PCR primers specific to dhfrIa sequences. The PCR primer pair (SEQ ID NOs. 1459 and 1460) was used in multiplex with the Escherichia coli/Shigella sp.-specific primers SEQ ID NOs. 1661 and 1665 described in Example 28. Sequence alignment analysis of dhfrIa sequences revealed regions suitable for the design of an internal probe specific to dhfrIa (SEQ ID NO. 2253). PCR amplification and agarose gel analysis of the amplified products were performed as described in Example 28 with an annealing temperature of 60° C. The specificity of the multiplex assay with 40-cycle PCR was verified by using 0.1 ng of purified genomic DNA from a panel of bacteria. The list included the following trimethoprim-sensitive strains, Salmonella typhimyurium, Salmonella typhi, Salmonella enteritidis, Tatumella ptyseos, Klebsiella pneumoniae, Enterobacter aerogenes, Citrobacter farmeri, Campylobacter jejuni, Serratia marcescens, Shigella dysenteriae, Shigella flexneri, Shigella sonnei, six trimethoprim-resistant Escherichia coli strains (containing dhfrIa or dhfrV or dhfrVII or dhfrXII or dhfrXIII or dhfrXV), four trimethoprim-resistant strains containing dhfrIa (Shigella sonnei, Shigella flexneri, Shigella dysenteriae and Escherichia coli). There was a perfect correlation between the dhfrIa genotype and the trimethoprim susceptibility pattern of the Escherichia coli and Shigella sp. strains tested. The dhfrIa primers were specific to the dhfrIa gene and did not amplify any of the other trimethoprim-resistant dhfr genes tested. The sensitivity of the multiplex assay with 40-cycle PCR was verified with three strains of trimethoprim-resistant strains of Shigella sp. The detection limit was 5 to 10 genome copies of DNA, depending on the Shigella sp. strains tested.

### Example 40

### Development of a PCR Assay for the Detection and Identification of Acinetobacter baumannii and its Associated Aminoglycoside Resistance Gene aph(3′)-VIa

[0367] The comparison of publicly available aph(3′)-VIa sequence revealed regions allowing the design of PCR primers specific to aph(3′)-VIa. The PCR primer pair (SEQ ID NOs. 1404 and 1405) was used in multiplex with the Acinetobacter baumannii-specific primers SEQ ID NOs. 1692 and 1693 described in Example 30. Analysis of the aph(3′)-VIa sequence revealed region suitable for the design of an internal probe specific to aph(3′)-VIa (SEQ ID NO. 2252). PCR amplification and agarose gel analysis of the amplified products were performed as described in Example 28. The specificity of the multiplex assay with 40-cycle PCR was verified by using 0.1 ng of purified genomic DNA from a panel of bacteria including: two aminoglycoside-resistant A. baumannii strains (containing aph(3′)-VIa), one aminoglycoside-sensitive A. baumanii strain, one of each of the following aminoglycoside-resistant bacteria, one Serratia marcescens strain containing the aminoglycoside-resistant gene aacC1, one Serratia marcescens strain containing the aminoglycoside-resistant gene aacC4, one Enterobacter cloacae strain containing the aminoglycoside-resistant gene aacC2 one Enterococcus faecalis containing the aminoglycoside-resistant gene aacA-aphD, one Pseudomonas aeruginosa strain containing the aminoglycoside-resistant gene aac6IIa and one of each of the following aminoglycoside-sensitive bacterial species, Acinetobacter anitratus, Acinetobacter lwoffi, Psychobbacter phenylpyruvian, Neisseria gonorrhoeae, Haemophilus haemolyticus, Haemophilus influenzae, Yersinia enterolitica, Proteus vulgaris, Eikenella corrodens, Escherichia coli. There was a perfect correlation between the aph(3′)-VIa genotype and the aminoglycoside susceptibility pattern of the A. baumannii strains tested. The aph(3′)-VIa-specific primers were specific to the aph(3′)-VIa gene and did not amplify any of the other aminoglycoside-resistant genes tested. The sensitivity of the multiplex assay with 40-cycle PCR was verified with two strains of aminoglycoside-resistant strains of A. baumannii. The detection limit was 5 genome copies of DNA for both A. baumannii strains tested.

### Example 41

### Specific Identification of Bacteroides fragilis Using atpD (V-type) Sequences

[0368] The comparison of atpD (V-type) sequences from a variety of bacterial species allowed the selection of PCR primers for Bacteroides fragilis. The strategy used to design the PCR primers was based on the analysis of a multiple sequence alignment of various atpD sequences from B. fragilis, as well as atpD sequences from the related species B. dispar, bacterial genera and archaea, especially representatives with phylogenetically related atpD sequences. A careful analysis of this alignment allowed the selection of oligonucleotide sequences which are conserved within the target species but which discriminate sequences from other species, especially from closely related species B. dispar, thereby permitting the species-specific and ubiquitous detection and identification of the target bacterial species.

[0369] The chosen primer pair, SEQ ID NOs. 2134-2135, produces an amplification product of 231 bp. Standard PCR was carried out on PTC-200 thermocyclers (MJ Research Inc.) using 0.4 μM of each primers pair as described in Example 28. The optimal cycling conditions for maximum sensitivity and specificity were as follows: three minutes at 95° C. for initial denaturation, then forty cycles of two steps consisting of 1 second at 95° C. and 30 seconds at 60° C., followed by terminal extension at 72° C. for 2 minutes.

[0370] The format of this assay is not limited to the one described above. A person skilled in the art could adapt the assay for different formats such as PCR with real-time detection using molecular beacon probes. Molecular beacon probes designed to be used in this assay include, but are not limited to, SEQ ID NO. 2136 for the detection of the B. fragilis amplicon.

### Example 42

### Evidence for Horizontal Gene Transfer in the Evolution of the Elongation Factor Tu in Enterococci

### Overview

[0371] The elongation factor Tu, encoded by tuf genes, is a GTP binding protein that plays a central role in protein synthesis. One to three tuf genes per genome are present depending on the bacterial species. Most low G+C gram-positive bacteria carry only one tuf gene. We have designed degenerate PCR primers derived from consensus sequences of the tuf gene to amplify partial tuf sequences from 17 enterococcal species and other phylogenetically related species. The amplified DNA fragments were sequenced either by direct sequencing or by sequencing cloned inserts containing putative amplicons. Two different tuf genes (tufA and tufB) were found in 11 enterococcal species, including Enterococcus avium, E. casseliflavus, E. dispar, E. durans, E. faecium, E. gallinarum, E. hirae, E. malodoratus, E. mundtii, E. pseudoavium, and E. raffinosus. For the other six enterococcal species (E. cecorum, E. columbae, E. faecalis, E. sulfureus, E. saccharolyticus, and E. solitarius), only the tufA gene was present. Based on 16S rRNA gene sequence analysis, the 11 species having two tuf genes all share a common ancestor, while the six species having only one copy diverged from the enterococcal lineage before that common ancestor. The presence of one or two copies of the tuf gene in enterococci was confirmed by Southern hybridization. Phylogenetic analysis of tuf sequences demonstrated that the enterococcal tufA gene branches with the Bacillus, Listeria and Staphylococcus genera, while the enterococcal tufB gene clusters with the genera Streptococcus and Lactococcus. Primary structure analysis showed that four amino acid residues within the sequenced regions are conserved and unique to the enterococcal tufB genes and the tuf genes of streptococci and L. lactis. The data suggest that an ancestral streptococcus or a streptococcus-related species may have horizontally transferred a tuf gene to the common ancestor of the 11 enterococcal species which now carry two tuf genes.

### Introduction

[0372] The elongation factor Tu (EF-Tu) is a GTP binding protein playing a central role in protein synthesis. It mediates the recognition and transport of aminoacyl-tRNAs and their positioning to the A-site of the ribosome. The highly conserved function and ubiquitous distribution render the elongation factor a valuable phylogenetic marker among eubacteria and even throughout the archaebacterial and eukaryotic kingdoms. The tuf genes encoding elongation factor Tu are present in various copy numbers per bacterial genome. Most gram-negative bacteria contain two tuf genes. As found in Escherichia coli, the two genes, while being almost identical in sequence, are located in different parts of the bacterial chromosome. However, recently completed microbial genomes revealed that only one tuf gene is found in Helicobacter pylori as well as in some obligate parasitic bacteria, such as Borrelia burgdorferi, Rickettsia prowazekii, and Treponema pallidum, and in some cyanobacteria. In most gram-positive bacteria studied so far, only one tuf gene was found. However, Southern hybridization showed that there are two tuf genes in some clostridia as well as in Streptomyces coelicolor and S. lividans. Up to three tuf-like genes have been identified in S. ramocissimus.

[0373] Although massive prokaryotic gene transfer is suggested to be one of the factors responsible for the evolution of bacterial genomes, the genes encoding components of the translation machinery are thought to be highly conserved and difficult to be transferred horizontally due to the complexity of their interactions. However, a few recent studies demonstrated evidence that horizontal gene transfer has also occurred in the evolution of some genes coding for the translation apparatus, namely, 16S rRNA and some aminoacyl-tRNA synthetases. No further data suggest that such a mechanism is involved in the evolution of the elongation factors. Previous studies concluded that the two copies of tuf genes in the genomes of some bacteria resulted from an ancient event of gene duplication. Moreover, a study of the tuf gene in R. prowazekii suggested that intrachromosomal recombination has taken place in the evolution of the genome of this organism.

[0374] To date, little is known about the tuf genes of enterococcal species. In this study, we analyzed partial sequences of tuf genes in 17 enterococcal species, namely, E. avium, E. casseliflavus, E. cecorum, E. columbae, E. dispar, E. durans, E. faecalis, E. faecium, E. gallinarum, E. hirae, E. malodoratus, E. mundtii, E. pseudoavium, E. raffinosus, E. saccharolyticus, E. solitarius, and E. sulfureus. We report here the presence of two divergent copies of tuf genes in 11 of these enterococcal species. The 6 other species carried a single tuf gene. The evolutionary implications are discussed.

### Materials and Methods

[0375] Bacterial strains. Seventeen enterococcal strains and other gram-positive bacterial strains obtained from the American Type Culture Collection (ATCC, Manassas, Va.) were used in this study (Table 16). All strains were grown on sheep blood agar or in brain-heart infusion broth prior to DNA isolation.

[0376] DNA isolation. Bacterial DNAs were prepared using the G NOME DNA extraction kit (Bio101, Vista, Calif.) as previously described.

[0377] Sequencing of putative tuf genes. In order to obtain the tuf gene sequences of enterococci and other gram-positive bacteria, two sequencing approaches were used: 1) sequencing of cloned PCR products and 2) direct sequencing of PCR products. A pair of degenerate primers (SEQ ID NOs. 664 and 697) were used to amplify an 886-bp portion of the tuf genes from enterococcal species and other gram-positive bacteria as previously described. For E. avium, E. casseliflavus, E. dispar, E. durans, E. faecium, E. gallinarum, E. hirae, E. mundtii, E. pseudoavium, and E. raffinosus, the amplicons were cloned using the Original TA cloning kit (Invitrogen, Carlsbad, Calif.) as previously described. Five clones for each species were selected for sequencing. For E. cecorum, E. faecalis, E. saccharolyticus, and E. solitarius as well as the other gram-positive bacteria, the sequences of the 886-bp amplicons were obtained by direct sequencing. Based on the results obtained from the earlier rounds of sequencing, two pairs of primers were designed for obtaining the partial tuf sequences from the other enterococcal species by direct sequencing. One pair of primers (SEQ ID NOs. 543 and 660) were used to amplify the enterococcal tuf gene fragments from E. columbae, E. malodoratus, and E. sulfureus. Another pair of primers (SEQ ID NOs. 664 and 661) were used to amplify the second tuf gene fragments from E. avium, E. malodoratus, and E. pseudoavium.

[0378] Prior to direct sequencing, PCR products were electrophoresed on 1% agarose gel at 120V for 2 hours. The gel was then stained with 0.02% methylene blue for 30 minutes and washed twice with autoclaved distilled water for 15 minutes. The gel slices containing PCR products of the expected sizes were cut out and purified with the QIAquick gel extraction kit (QIAgen Inc., Mississauga, Ontario, Canada) according to the manufacturer's instructions. PCR mixtures for sequencing were prepared as described previously. DNA sequencing was carried out with the Big Dye™ Terminator Ready Reaction cycle sequencing kit using a 377 DNA sequencer (PE Applied Biosystems, Foster City, Calif.). Both strands of the amplified DNA were sequenced. The sequence data were verified using the Sequencer™ 3.0 software (Gene Codes Corp., Ann Arbor, Mich.).

[0379] Sequence analysis and phylogenetic study. Nucleotide sequences of the tuf genes and their respective flanking regions for E. faecalis, Staphylococcus aureus, and Streptococcus pneumoniae, were retrieved from the TIGR microbial genome database and S. pyogenes from the University of Oklahoma database. DNA sequences and deduced protein sequences obtained in this study were compared with those in all publicly available databases using the BLAST and FASTA programs. Unless specified, sequence analysis was conducted with the programs from GCG package (Version 10; Genetics Computer Group, Madison, Wis.). Sequence alignment of the tuf genes from 74 species representing all three kingdoms of life (Tables 16 and 17) were carried out by use of Pileup and corrected upon visual analysis. The N- and C-termini extremities of the sequences were trimmed to yield a common block of 201 amino acids sequences and equivocal residues were removed. Phylogenetic analysis was performed with the aid of PAUP 4.0b4 written by Dr. David L. Swofford (Sinauer Associates, Inc., Publishers, Sunderland, Mass.). The distance matrix and maximum parsimony were used to generate phylogenetic trees and bootstrap resampling procedures were performed using 500 and 100 replications in each analysis, respectively.

[0380] Protein structure analysis. The crystal structures of (i) Thermus aquaticus EF-Tu in complex with Phe-tRNA^{Phe} and a GTP analog and (ii) E. coli EF-Tu in complex with GDP served as templates for constructing the equivalent models for enterococcal EF-Tu. Homology modeling of protein structure was performed using the SWISS-MODEL server and inspected using the SWISS-PDB viewer version 3.1.

[0381] Southern hybridization. In a previous study, we amplified and cloned an 803-bp PCR product of the tuf gene fragment from E. faecium. Two divergent sequences of the inserts, which we assumed to be tufA and tufB genes, were obtained. The recombinant plasmid carrying either tufA or tufB sequence was used to generate two probes labeled with Digoxigenin (DIG)-11-dUTP by PCR incorporation following the instructions of the manufacturer (Boehringer Mannheim, Laval, Quebec, Canada). Enterococcal genomic DNA samples (1-2 μg) were digested to completion with restriction endonucleases BglII and XbaI as recommended by the supplier (Amersham Pharmacia Biotech, Mississauga, Ontario, Canada). These restriction enzymes were chosen because no restriction sites were observed within the amplified tuf gene fragments of most enterococci. Southern blotting and filter hybridization were performed using positively charged nylon membranes (Boehringer Mannheim) and QuikHyb hybridization solution (Stratagene Cloning Systems, La Jolla, Calif.) according to the manufacturers' instructions with modifications. Twenty μl of each digestion were electrophoresed for 2 h at 120V on a 0.8% agarose gel. The DNA fragments were denatured with 0.5 M NaOH and transferred by Southern blotting onto a positively charged nylon membrane (Boehringer Mannheim). The filters were pre-hybridized for 15 min and then hybridized for 2 h in the QuikHyb solution at 68° C. with either DIG-labeled probe. Posthybridization washings were performed twice with 0.5×SSC, 1% SDS at room temperature for 15 min and twice in the same solution at 60° C. for 15 min. Detection of bound probes was achieved using disodium 3-(4-methoxyspiro(1,2-dioxetane-3,2′-(5′-chloro)tricyclo(3.3.1.1^{3.7})decan)-4-yl)phenyl phosphate (CSPD) (Boehringer Mannheim) as specified by the manufacturer.

[0382] GenBank submission. The GenBank accession numbers for partial tuf gene sequences generated in this study are given in Table 16.

### Results

[0383] Sequencing and nucleotide sequence analysis. In this study, all gram-positive bacteria other than enterococci yielded a single tuf sequence of 886 bp using primers SEQ ID NOs. 664 and 697 (Table 16). Each of four enterococcal species including E. cecorum, E. faecalis, E. saccharolyticus, and E. solitarius also yielded one 886-bp tuf sequence. On the other hand, for E. avium, E. casseliflavus, E. dispar, E. durans, E. faecium, E. gallinarum, E. hirae, E. mundtii, E. pseudoavium, and E. raffinosus, direct sequencing of the 886-bp fragments revealed overlapping peaks according to their sequence chromatograms, suggesting the presence of additional copies of the tuf gene. Therefore, the tuf gene fragments of these 10 species were cloned first and then sequenced. Sequencing data revealed that two different types of tuf sequences (tufA and tufB) are found in eight of these species including E. casseliflavus, E. dispar, E. durans, E. faecium, E. gallinarum, E. hirae, E. mundtii, and E. raffinosus. Five clones from E. avium and E. pseudoavium yielded only a single tuf sequence. These new sequence data allowed the design of new primers specific for the enterococcal tufA or tufB sequences. Primers SEQ ID NOs. 543 and 660 were designed to amplify only enterococcal tufA sequences and a 694-bp fragment was amplified from all 17 enterococcal species. The 694-bp sequences of tufA genes from E. columbae, E. malodoratus, and E. sulfureus were obtained by direct sequencing using these primers. Primers SEQ ID NOs. 664 and 661 were designed for the amplification of 730-bp portion of tufB genes and yielded the expected fragments from 11 enterococcal species, including E. malodoratus and the 10 enterococcal species in which heterogeneous tuf sequences were initially found. The sequences of the tufB fragments for E. avium, E. malodoratus and E. pseudoavium were determined by direct sequencing using the primers SEQ ID NOs. 664 and 661. Overall, tufA gene fragments were obtained from all 17 enterococcal species but tufB gene fragments were obtained with only 11 enterococcal species (Table 16).

[0384] The identities between tufA and tufB for each enterococcal species were 68-79% at the nucleotide level and 81 to 89% at the amino acid level. The tufA gene is highly conserved among all enterococcal species with identities varying from 87% to 99% for DNA and 93% to 99% for amino acid sequences, while the identities among tufB genes of enterococci varies from 77% to 92% for DNA and 91% to 99% for amino acid sequences, indicating their different origins and evolution (Table 18). Since E. solitarius has been transferred to the genus Tetragenococcus, which is also a low G+C gram-positive bacterium, our sequence comparison did not include this species as an enterococcus. G+C content of enterococcal tufA sequences ranged from 40.8% to 43.1%, while that of enterococcal tufB sequences varied from 37.8% to 46.3%. Based on amino acid sequence comparison, the enterococcal tufA gene products share higher identities with those of Abiotrophia adiacens, Bacillus subtilis, Listeria monocytogenes, S. aureus, and S. epidermidis. On the other hand, the enterococcal tufB gene products share higher percentages of amino acid identity with the tuf genes of S. pneumoniae, S. pyogenes and Lactococcus lactis (Table 18).

[0385] In order to elucidate whether the two enterococcal tuf sequences encode genuine EF-Tu, the deduced amino acid sequences of both genes were aligned with other EF-Tu sequences available in SWISSPROT (Release 38). Sequence alignment demonstrated that both gene products are highly conserved and carry all conserved residues present in this portion of prokaryotic EF-Tu (FIG. 4). Therefore, it appears that both gene products could fulfill the function of EF-Tu. The partial tuf gene sequences encode the portion of EF-Tu from residues 117 to 317, numbered as in E. coli. This portion makes up of the last four α-helices and two β-strands of domain I, the entire domain II and the N-terminal part of domain III on the basis of the determined structures of E. coli EF-Tu.

[0386] Based on the deduced amino acid sequences, the enterococcal tufB genes have unique conserved residues Lys129, Leu140, Ser230, and Asp234 (E. coli numbering) that are also conserved in streptococci and L. lactis, but not in the other bacteria (FIG. 4). All these residues are located in loops except for Ser230. In other bacteria the residue Ser230 is substituted for highly conserved Thr, which is the 5^{th} residue of the third N-strand of domain II. This region is partially responsible for the interaction between the EF-Tu and aminoacyl-tRNA by the formation of a deep pocket for any of the 20 naturally occurring amino acids. According to our three-dimensional model (data not illustrated), the substitution Thr230→Ser in domain II of EF-Tu may have little impact on the capability of the pocket to accommodate any amino acid. However, the high conservation of Thr230 comparing to the unique Ser substitution found only in streptococci and 11 enterococci could suggest a subtle functional role for this residue.

[0387] The tuf gene sequences obtained for E. faecalis, S. aureus, S. pneumoniae and S. pyogenes were compared with their respective incomplete genome sequence. Contigs with more than 99% identity were identified. Analysis of the E. faecalis genome data revealed that the single E. faecalis tuf gene is located within an str operon where tuf is preceded by fus that encodes the elongation factor G. This str operon is present in S. aureus and B. subtilis but not in the two streptococcal genomes examined. The 700-bp or so sequence upstream the S. pneumoniae tuf gene has no homology with any known gene sequences. In S. pyogenes, the gene upstream of tuf is similar to a cell division gene, ftsW, suggesting that the tuf genes in streptococci are not arranged in a str operon.

[0388] Phylogenetic analysis. Phylogenetic analysis of the tuf amino acid sequences with representatives of eubacteria, archeabacteria, and eukaryotes using neighbor-joining and maximum parsimony methods showed three major clusters representing the three kingdoms of life. Both methods gave similar topologies consistent with the rRNA gene data (data not shown). Within the bacterial clade, the tree is polyphyletic but tufA genes from all enterococcal species always clustered with those from other low G+C gram-positive bacteria (except for streptococci and lactococci), while the tufB genes of the 11 enterococcal species form a distinct cluster with streptococci and L. lactis (FIG. 5). Duplicated genes from the same organism do not cluster together, thereby not suggesting evolution by recent gene duplication.

[0389] Southern hybridization. Southern hybridization of BglII/XbaI digested genomic DNA from 12 enterococcal species tested with the tufA probe (DIG-labeled tufA fragment from E. faecium) yielded two bands of different sizes in 9 species, which also carried two divergent tuf sequences according to their sequencing data. For E. faecalis and E. solitarius, a single band was observed indicating that one tuf gene is present (FIG. 6). A single band was also found when digested genomic DNA from S. aureus, S. pneumoniae, and S. pyogenes were hybridized with the tufA probe (data not shown). For E. faecium, the presence of three bands can be explained by the existence of a XbaI restriction site in the middle of the tufA sequence, which was confirmed by sequencing data. Hybridization with the tufB probe (DIG-labeled tufB fragment of E. faecium) showed a banding profile similar to the one obtained with the tufA probe (data not shown).

### Discussion

[0390] In this study, we have shown that two divergent copies of genes encoding the elongation factor Tu are present in some enterococcal species. Sequence data revealed that both genes are highly conserved at the amino acid level. One copy (tufA) is present in all enterococcal species, while the other (tufB) is present only in 11 of the 17 enterococcal species studied. Based on 16S rRNA sequence analysis, these 11 species are members of three different enterococcal subgroups (E. avium, E. faecium, and E. gallinarum species groups) and a distinct species (E. dispar). Moreover, 16S rDNA phylogeny suggests that these 11 species possessing 2 tuf genes all share a common ancestor before they further evolved to become the modern species. Since the six other species having only one copy diverged from the enterococcal lineage before that common ancestor, it appears that the presence of one tuf gene in these six species is not attributable to gene loss.

[0391] Two clusters of low G+C gram-positive bacteria were observed in the phylogenetic tree of the tuf genes: one contains a majority of low G+C gram-positive bacteria and the other contains lactococci and streptococci. This is similar to the finding on the basis of phylogenetic analysis of the 16S rRNA gene and the hrcA gene coding for a unique heat-shock regulatory protein. The enterococcal tufA genes branched with most of the low G+C gram-positive bacteria, suggesting that they originated from a common ancestor. On the other hand, the enterococcal tufB genes branched with the genera Streptococcus and Lactococcus that form a distinct lineage separated from other low G+C gram-positive bacteria (FIG. 5). The finding that these EF-Tu proteins share some conserved amino acid residues unique to this branch also supports the idea that they may share a common ancestor. Although these conserved residues might result from convergent evolution upon a specialized function, such convergence at the sequence level, even for a few residues, seems to be rare, making it an unlikely event. Moreover, no currently known selective pressure, if any, would account for keeping one versus two tuf genes in bacteria. The G+C contents of enterococcal tufA and tufB sequences are similar, indicating that they both originated from low G+C gram-positive bacteria, in accordance with the phylogenetic analysis.

[0392] The tuf genes are present in various copy numbers in different bacteria. Furthermore, the two tuf genes are normally associated with characteristic flanking genes. The two tuf gene copies commonly encountered within gram-negative bacteria are part of the bacterial str operon and tRNA-tufB operon, respectively. The arrangement of tufA in the str operon was also found in a variety of bacteria, including Thermotoga maritima, the most ancient bacteria sequenced so far, Aquifex aeolicus, cyanobacteria, Bacillus sp., Micrococcus luteus, Mycobacterium tuberculosis, and Streptomyces sp. Furthermore, the tRNA-tufB operon has also been identified in Aquifex aeolicus, Thermus thermophilus, and Chlamydia trachomatis. The two widespread tuf gene arrangements argue in favor of their ancient origins. It is noteworthy that most obligate intracellular parasites, such as Mycoplasma sp., R. prowazekii, B. burgdorferi, and T. pallidum, contain only one tuf gene. Their flanking sequences are distinct from the two conserved patterns as a result of selection for effective propagation by an extensive reduction in genome size by intragenomic recombination and rearrangement.

[0393] Most gram-positive bacteria with low G+C content sequenced to date contain only a single copy of the tuf gene as a part of the str operon. This is the case for B. subtilis, S. aureus and E. faecalis. PCR amplification using a primer targeting a conserved region of the fus gene and the tufA-specific primer SEQ ID NO. 660, but not the tufB-specific primer SEQ ID NO. 661, yielded the expected amplicons for all 17 enterococcal species tested, indicating the presence of the fus-tuf organization in all enterococci (data not shown). However, in the genomes of S. pneumoniae and S. pyogenes, the sequences flanking the tuf genes varies although the tuf gene itself remains highly conserved. The enterococcal tufB genes are clustered with streptococci, but at present we do not have enough data to identify the genes flanking the enterococcal tufB genes. Furthermore, the functional role of the enterococcal tufB genes remains unknown. One can only postulate that the two divergent gene copies are expressed under different conditions.

[0394] The amino acid sequence identities between the enterococcal tufA and tufB genes are lower than either i) those between the enterococcal tufA and the tuf genes from other low G+C gram-positive bacteria (streptococci and lactococci excluded) or ii) those between the enterococcal tufB and streptococcal and lactococcal tuf genes. These findings suggest that the enterococcal tufA genes share a common ancestor with other low G+C gram-positive bacteria via the simple scheme of vertical evolution, while the enterococcal tufB genes are more closely related to those of streptococci and lactococci. The facts that some enterococci possess an additional tuf gene and that the single streptococcal tuf gene is not clustered with other low G+C gram-positive bacteria cannot be explained by the mechanism of gene duplication or intrachromosomal recombination. According to sequence and phylogenetic analysis, we propose that the presence of the additional copy of the tuf genes in 11 enterococcal species is due to horizontal gene transfer. The common ancestor of the 11 enterococcal species now carrying tufB genes acquired a tuf gene from an ancestral streptococcus or a streptococcus-related species during enterococcal evolution through gene transfer before the diversification of modern enterococci. Further study of the flanking regions of the gene may provide more clues for the origin and function of this gene in enterococci.

[0395] Recent studies of genes and genomes have demonstrated that considerable horizontal transfer occurred in the evolution of aminoacyl-tRNA synthetases in all three kingdoms of life. The heterogeneity of 16S rRNA is also attributable to horizontal gene transfer in some bacteria, such as Streptomyces, Thermomonospora chromogena and Mycobacterium celatum. In this study, we provide the first example in support of a likely horizontal transfer of the tuf gene encoding the elongation factor Tu. This may be an exception since stringent functional constraints do not allow for frequent horizontal transfer of the tuf gene as with other genes. However, enterococcal tuf genes should not be the only such exception as we have noticed that the phylogeny of Streptomyces tuf genes is equally or more complex than that of enterococci. For example, the three tuf-like genes in a high G+C gram-positive bacterium, S. ramocissimus, branched with the tuf genes of phylogenetically divergent groups of bacteria (FIG. 5). Another example may be the tuf genes in clostridia, which represent a phylogenetically very broad range of organisms and form a plethora of lines and groups of various complexities and depths. Four species belonging to three. different clusters within the genus Clostridium have been shown by Southern hybridization to carry two copies of the tuf gene. Further sequence data and phylogenetic analysis may help interpreting the evolution of the elongation factor Tu in these gram-positive bacteria. Since the tuf genes and 16S rRNA genes are often used for phylogenetic study, the existence of duplicate genes originating from horizontal gene transfer may alter the phylogeny of microorganisms when the laterally acquired copy of the gene is used for such analysis. Hence, caution should be taken in interpreting phylogenetic data. In addition, the two tuf genes in enterococci have evolved separately and are distantly related to each other phylogenetically. The enterococcal tufB genes are less conserved and unique to the 11 enterococcal species only. We previously demonstrated that the enterococcal tufA genes could serve as a target to develop a DNA-based assay for identification of enterococci. The enterococcal tufB genes would also be useful in identification of these 11 enterococcal species.

### Example 43

### Elongation Factor Tu (tuf) and the F-ATPase Beta-Subunit (atpD) as Phylogenetic Tools for Species of the Family Enterobacteriaceae

### Summary

[0396] The phylogeny of enterobacterial species commonly found in clinical samples was analyzed by comparing partial sequences of their elongation factor Tu (tuf) genes and their F-ATPase beta-subunit (atpD) genes. A 884-bp fragment for tuf and a 884- or 871-bp fragment for atpD were sequenced for 88 strains of 72 species from 25 enterobacterial genera. The atpD sequence analysis revealed a specific indel to Pantoea and Tatumella species showing for the first time a tight phylogenetic affiliation between these two genera. Comprehensive tuf and atpD phylogenetic trees were constructed and are in agreement with each other. Monophyletic genera are Yersinia, Pantoea, Edwardsiella, Cedecea, Salmonella, Serratia, Proteus, and Providencia. Analogous trees were obtained based on available 16S rDNA sequences from databases. tuf and atpD phylogenies are in agreement with the 16S rDNA analysis despite the smaller resolution power for the latter. In fact, distance comparisons revealed that tuf and atpD genes provide a better resolution for pairs of species belonging to the family Enterobacteriaceae. However, 16S rDNA distances are better resolved for pairs of species belonging to different families. In conclusion, tuf and atpD conserved genes are sufficiently divergent to discriminate different species inside the family Enterobacteriaceae and offer potential for the development of diagnostic tests based on DNA to identify enterobacterial species.

### Introduction

[0397] Members of the family Enterobacteriaceae are facultatively anaerobic gram-negative rods, catalase-positive and oxydase-positive (Brenner, 1984). They are found in soil, water, plants, and in animals from insects to man. Many enterobacteria are opportunistic pathogens. In fact, members of this family are responsible for about 50% of nosocomial infections in the United States (Brenner, 1984). Therefore, this family is of considerable clinical importance.

[0398] Major classification studies on the family Enterobacteriaceae are based on phenotypic traits (Brenner et al., 1999; Brenner et al., 1980; Dickey & Zumoff, 1988; Farmer III et al., 1980; Farmer III et al., 1985b; Farmer III et al., 1985a) such as biochemical reactions and physiological characteristics. However, phenotypically distinct strains may be closely related by genotypic criteria and may belong to the same genospecies (Bercovier et al., 1980; Hartl & Dykhuizen, 1984). Also, phenotypically close strains (biogroups) may belong to different genospecies, like Klebsiella pneumoniae and Enterobacter aerogenes (Brenner, 1984) for example. Consequently, identification and classification of certain species may be ambiguous with techniques based on phenotypic tests (Janda et al., 1999; Kitch et al., 1994; Sharma et al., 1990).

[0399] More advances in the classification of members of the family Enterobacteriaceae have come from DNA-DNA hybridization studies (Brenner et al., 1993; Brenner et al., 1986; Brenner, et al., 1980; Farmer III, et al., 1980; Farmer III, et al., 1985b; Izard et al., 1981; Steigerwalt et al., 1976). Furthermore, the phylogenetic significance of bacterial classification based on 16S rDNA sequences has been recognized by many workers (Stackebrandt & Goebel, 1994; Wayne et al., 1987). However, members of the family Enterobacteriaceae have not been subjected to extensive phylogenetic analysis of 16S rDNA (Sproer et al., 1999). In fact, this molecule was not thought to solve taxonomic problems concerning closely related species because of its very high degree of conservation (Brenner, 1992; Sproer, et al., 1999). Another drawback of the 16S rDNA gene is that it is found in several copies within the genome (seven in Escherichia coli and Salmonella typhimurium) (Hill & Harnish, 1981). Due to sequence divergence between the gene copies, direct sequencing of PCR products is often not suitable to achieve a representative sequence (Cilia et al., 1996; Hill & Harnish, 1981). Other genes such as gap and ompA (Lawrence et al., 1991), rpoB (Mollet et al., 1997), and infB (Hedegaard et al., 1999) were used to resolve the phylogeny of enterobacteria. However, none of these studies covered an extensive number of species.

[0400] tuf and atpD are the genes encoding the elongation factor Tu (EF-Tu) and the F-ATPase beta-subunit, respectively. EF-Tu is involved in peptide chain formation (Ludwig et al., 1990). The two copies of the tuf gene (tufA and tufB) found in enterobacteria (Sela et al., 1989) share high identity level (99%) in Salmonella typhimurium and in E. coli. The recombination phenomenon could explain sequence homogenization between the two copies (Abdulkarim & Hughes, 1996; Grunberg-Manago, 1996). F-ATPase is present on the plasma membranes of eubacteria (Nelson & Taiz, 1989). It functions mainly in ATP synthesis (Nelson & Taiz, 1989) and the beta-subunit contains the catalytic site of the enzyme. EF-Tu and F-ATPase are highly conserved throughout evolution and shows functional constancy (Amann et al., 1988; Ludwig, et al., 1990). Recently, phylogenies based on protein sequences from EF-Tu and F-ATPase beta-subunit showed good agreement with each other and with the rDNA data (Ludwig et al., 1993).

[0401] We elected to sequence 884-bp fragments of tuf and atpD from 88 clinically relevant enterobacterial strains representing 72 species from 25 genera. These sequences were used to create phylogenetic trees that were compared with 16S rDNA trees. These trees revealed good agreement with each others and demonstrated the high resolution of tuf and atpD phylogenies at the species level.

### Materials and Methods

[0402] Bacterial strains and genomic material. All bacterial strains used in this study were obtained from the American Type Culture Collection (ATCC) or the Deutsche Sammlung von Mikroorganismen und Zellkulturen GmbH (DSMZ). These enterobacteria can all be recovered from clinical specimens, but not all are pathogens. Whenever possible, we choose type strains. Identification of all strains was confirmed by classical biochemical tests using the automated system MicroScan WalkAway-96 system equipped with a Negative BP Combo Panel Type 15 (Dade Behring Canada). Genomic DNA was purified using the G NOME DNA kit (Bio 101). Genomic DNA from Yersinia pestis was kindly provided by Dr. Robert R. Brubaker. Strains used in this study and their descriptions are shown in Table 19.

[0403] PCR primers. The eubacterial tuf and atpD gene sequences available from public databases were analyzed using the GCG package (version 8.0) (Genetics Computer Group). Based on multiple sequence alignments, two highly conserved regions were chosen for each genes, and PCR primers were derived from these regions with the help of Oligo primer analysis software (version 5.0) (National Biosciences). A second 5′ primer was design to amplify the gene atpD for few enterobacteria difficult to amplify with the first primer set. When required, the primers contained inosines or degeneracies to account for variable positions. Oligonucleotide primers were synthesized with a model 394 DNA/RNA synthesizer (PE Applied Biosystems). PCR primers used in this study are listed in Table 20.

[0404] DNA sequencing. An 884-bp portion of the tuf gene and an 884-bp portion (or alternatively an 871-bp portion for a few enterobacterial strains) of the atpD gene were sequenced for all enterobacteria listed in the first strain column of Table 19. Amplification was performed with 4 ng of genomic DNA. The 40-μl PCR mixtures used to generate PCR products for sequencing contained 1•0 μM each primer, 200 μM each deoxyribonucleoside triphosphate (Pharmacia Biotech), 10 mM Tris-HCl (pH 9•0 at 25° C.), 50 mM KCl, 0•1% (w/v) Triton X-100, 2•5 mM MgCl₂, 0•05 mM BSA, 0•3 U of Taq DNA polymerase (Promega) coupled with TaqStart™ antibody (Clontech Laboratories). The TaqStart™ neutralizing monoclonal antibody for Taq DNA polymerase was added to all PCR mixtures to enhance efficiency of amplification (Kellogg et al., 1994). The PCR mixtures were subjected to thermal cycling (3 min at 95° C. and then 35 cycles of 1 min at 95° C., 1 min at 55° C. for tuf or 50° C. for atpD, and 1 min at 72° C., with a 7-min final extension at 72° C.) using a PTC-200 DNA Engine thermocycler (MJ Research). PCR products having the predicted sizes were recovered from an agarose gel stained for 15 min with 0•02% of methylene blue followed by washing in sterile distilled water for 15 min twice (Flores et al., 1992). Subsequently, PCR products having the predicted sizes were recovered from gels using the QIAquick gel extraction kit (QIAGEN).

[0405] Both strands of the purified amplicons were sequenced using the ABI Prism BigDye Terminator Cycle Sequencing Ready Reaction Kit (PE Applied Biosystems) on an automated DNA sequencer (Model 377). Amplicons from two independent PCR amplifications were sequenced for each strain to ensure the absence of sequencing errors attributable to nucleotide miscorporations by the Taq DNA polymerase. Sequence assembly was performed with the aid of Sequencher 3.0 software (Gene Codes).

[0406] Phylogenetic analysis. Multiple sequence alignments were performed using PileUp from the GCG package (Version 10.0) (Genetics Computer Group) and checked by eye with the editor SeqLab to edit sequences if necessary and to note which regions were to be excluded for phylogenetic analysis. Vibrio cholerae and Shewanella putrefaciens were used as outgroups. Bootstrap subsets (750 sets) and phylogenetic trees were generated with the Neighbor Joining algorithm from Dr. David Swofford's PAUP (Phylogenetic Analysis Using Parsimony) Software version 4.0b4 (Sinauer Associates) and with tree-bisection branch-swapping. The distance model used was Kimura (1980) two-parameter. Relative rate test was performed with the aid of Phyltest program version 2.0 (c).

### Results and Discussion

### DNA Amplification, Sequencing and Sequence Alignments

[0407] A PCR product of the expected size of 884 bp was obtained for tuf and of 884 or 871 bp for atpD from all bacterial strains tested. After subtracting for biased primer regions and ambiguous single strand data, sequences of at least 721 bp for tuf and 713 bp for atpD were submitted to phylogenetic analyses. These sequences were aligned with tuf and atpD sequences available in databases to verify that the nucleotide sequences indeed encoded a part of tested genes. Gaps were excluded to perform phylogenetic analysis.

### Signature Sequences

[0408] From the sequence alignments obtained from both tested genes, only one insertion was observed. This five amino acids insertion is located between the positions 325 and 326 of atpD gene of E. coli strain K-12 (Saraste et al., 1981) and can be considered a signature sequence of Tatumella ptyseos and Pantoea species (FIG. 7). The presence of a conserved indel of defined length and sequence and flanked by conserved regions could suggest a common ancestor, particularly when members of a given taxa share this indel (Gupta, 1998). To our knowledge, high relatedness between the genera Tatumella and Pantoea is demonstrated for the first time.

[0409] Enterobacter agglomerans ATCC 27989 sequence does not possess the five amino acid indel (FIG. 7). This indel could represent a useful marker to help resolve the Enterobacter agglomerans and Pantoea classification. Indeed, the transfer of Enterobacter agglomerans to Pantoea agglomerans was proposed in 1989 by Gavini et al. (Gavini et al., 1989). However, some strains are provisionally classified as Pantoea sp. until their interrelatedness is elucidated (Gavini, et al., 1989). Since the transfer was proposed, the change of nomenclature has not yet been made for all Enterobacter agglomerans in the ATCC database. The absence of the five amino acids indel suggests that some strains of Enterobacter agglomerans most likely do not belong to the genus Pantoea.

### Phylogenetic Trees Based on Partial Tuf Sequences, Atpd Sequences, and Published 16S Rdna Data of Members of the Enterobacteriaceae.

[0410] Representative trees constructed from tuf and atpD sequences with the neighbor-joining method are shown in FIG. 8. The phylogenetic trees generated from partial tuf sequences and atpD sequences are very similar. Nevertheless, atpD tree shows more monophyletic groups corresponding to species that belong to the same genus. These groups are more consistent with the actual taxonomy. For both genes, some genera are not monophyletic. These results support previous phylogenies based on the genes gap and ompA (Lawrence, et al., 1991), rpoB (Mollet, et al., 1997), and infB (Hedegaard, et al., 1999) which all showed that the genera Escherichia and Klebsiella are polyphyletic. There were few differences in branching between tuf and atpD genes.

[0411] Even though Pantoea agglomerans and Pantoea dispersa indels were excluded for phylogenetic analysis, these two species grouped together and were distant from Enterobacter agglomerans ATCC 27989, adding another evidence that the latter species is heterogenous and that not all members of this species belong to the genus Pantoea. In fact, the E. agglomerans strain ATCC 27989 exhibits branch lengths similar to others Enterobacter species with both genes. Therefore, we suggest that this strain belong to the genus Enterobacter until further reclassification of that genus.

[0412] tuf and atpD trees exhibit very short genetic distances between taxa belonging to the same genetic species including species segregated for clinical considerations. This first concern E. coli and Shigella species that were confirmed to be the same genetic species by hybridization studies (Brenner et al., 1972; Brenner et al., 1972; Brenner et al., 1982) and phylogenies based on 16S rDNA (Wang et al., 1997) and rpoB genes (Mollet, et al., 1997). Hybridization studies (Bercovier, et al., 1980) and phylogeny based on 16S rDNA genes (Ibrahim et al., 1994) demonstrated also that Yersinia pestis and Y. pseudotuberculosis are the same genetic species. Among Yersinia pestis and Y. pseudotuberculosis, the three Klebsiella pneumoniae subspecies, E. coli-Shigella species, and Salmonella choleraesuis subspecies, Salmonella is a less tightly knit species than the other genetic species. The same is true for E. coli and Shigella species.

[0413] Escherichia fergusonii is very close to E. coli-Shigella genetic species. This observation is corroborated by 16S rDNA phylogeny (McLaughlin et al., 2000) but not by DNA hybridization values. In fact, E. fergusonii is only 49% to 63% related to E. coli-Shigella (Farmer III, et al., 1985b). It was previously observed that very recently diverged species may not be recognizable based on 16S rDNA sequences although DNA hybridization established them as different species (Fox et al., 1992). Therefore, E. fergusonii could be a new “quasi-species”.

[0414] atpD phylogeny revealed Salmonella subspecies divisions consistent with the actual taxonomy. This result was already observed by Christensen et al. (Christensen & Olsen; 1998). Nevertheless, tuf partial sequences discriminate less than atpD between Salmonella subspecies.

[0415] Overall, tuf and atpD phylogenies exhibit enough divergence between species to ensure efficient discrimination. Therefore, it could be easy to distinguish phenotypically close enterobacteria belonging to different genetic species such as Klebsiella pneumoniae and Enterobacter aerogenes.

[0416] Phylogenetic relationships between Salmonella, E. coli and C. freundii are not well defined. 16S rDNA and 23S rDNA sequence data reveals a closer relationship between Salmonella and E. coli than between Salmonella and C. freundii (Christensen et al., 1998), while DNA homology studies (Selander et al., 1996) and infb phylogeny (Hedegaard, et al., 1999) showed that Salmonella is more closely related to C. freundii than to E. coli. In that regard, tuf and atpD phylogenies are coherent with 16S rDNA and 23S rDNA sequence analysis.

[0417] Phylogenetic analyses were also performed using amino acids sequences. tuf tree based on amino acids is characterized by a better resolution between taxa outgroup and taxa ingroup (enterobacteria) than tree based on nucleic acids whereas atpD trees based on amino acids and nucleic acids give almost the same resolution between taxa outgroup and ingroup (data not shown).

[0418] Relative rate test (or two cluster test (Takezaki et al., 1995)) evaluates if evolution is constant between two taxa. Before to apply the test, the topology of a tree is determined by tree-building method without the assumption of rate constancy. Therefore, two taxa (or two groups of taxa) are compared with a third taxon that is an outgroup of the first two taxa (Takezaki, et al., 1995). Few pairs of taxa that exhibited a great difference between their branch lengths at particular nodes were chosen to perform the test. This test reveals that tuf and atpD are not constant in their evolution within the family Enterobacteriaceae. For tuf, for example, the hypothesis of rate constancy is rejected (Z value higher than 1-96) between Yersinia species. The same is true for Proteus species. For atpD, for example, evolution is not constant between Proteus species, between Proteus species and Providencia species, and between Yersinia species and Escherichia coli. For 16S rDNA, for example, evolution is not constant between two E. coli, between E. coli and Enterobacter aerogenes, and between E. coli and Proteus vulgaris. These results suggest that tuf, atpD and 16S rDNA could not serve as a molecular clock for the entire family Enterobacteriaceae.

[0419] Since the number and the nature of taxa can influence topology of trees, phylogenetic trees from tuf and atpD were reconstructed using sequences corresponding to strains for which 16S rDNA genes were published in GenEMBL. These trees were similar to those generated using 16S rDNA (FIG. 9). Nevertheless, 16S rDNA tree gave poorer resolution power than tuf and atpD gene trees. Indeed, these latter exhibited less multifurcation (polytomy) than the 16S rDNA tree.

Comparison of Distances Based on tuf, atpD, and 16S rDNA Data

[0420] tuf, atpD, and 16S rDNA distances (i.e. the number of differences per nucleotide site) were compared with each other for each pair of strains. We found that the tuf and atpD distances were respectively 2•268±0•965 and 2•927±0•896 times larger than 16S rDNA distances (FIGS. 10a and b). atpD distances were 1•445±0•570 times larger than tuf distances (FIG. 10c). FIG. 10 also shows that the tuf, atpD, and 16S rDNA distances between members of different species of the same genus (0•053±0•034, 0•060±0•020, and 0•024±0•010, respectively) were in mean smaller than the distances between members of different genera belonging to the same family (0•103±0•053, 0•129±0•051, and 0•044±0•013, respectively). However, the overlap exhibits with standard deviations add to a focus of evidences that some enterobacterial genera are not well defined (Brenner, 1984). In fact, many distances for pairs of species especially belonging to the genera Escherichia, Shigella, Enterobacter, Citrobacter, Klebsiella, and Kluyvera overlap distances for pairs of species belonging to the same genus (FIG. 10). For example, distances for pairs composed by species of Citrobacter and species of Klebsiella overlap distances for pairs composed by two Citrobacter or by two Klebsiella.

[0421] Observing the distance distributions, 16S rDNA distances reveal a clear separation between the families Enterobacteriaceae and Vibrionaceae despite the fact that the family Vibrionaceae is genetically very close to the Enterobacteriaceae (FIGS. 10a and b). Nevertheless, tuf and atpD show higher discriminating power below the family level (FIGS. 10a and b).

[0422] There were some discrepancies in the relative distances for the same pairs of taxa between the two genes studied. First, distances between Yersinia species are at least two times lower for atpD than for tuf (FIG. 10c). Also, distances at the family level (between Enterobacteriaceae and Vibrionaceae) show that Enterobacteriaceae is a tightlier knit family with atpD gene (Proteus genus excepted) than with tuf gene. Both genes well delineate taxa belonging to the same species. There is one exception with atpD: Klebsiella planticola and K. ornithinolithica belong to the same genus but fit with taxa belonging to the same species (FIGS. 10a and c). These two species are also very close genotypically with tuf gene. This suggest that Klebsiella planticola and K. ornithinolithica could be two newborn species. tuf and atpD genes exhibit little distances between Escherichia fergusonii and E. coli-Shigella species. Unfortunately, comparison with 16S rDNA could not be achieved because the E. fergusonii 16S rDNA sequence is not yet accessible in GenEMBL database. Therefore, the majority of phenotypically close enterobacteria could be easily discriminated genotypically using tuf and atpD gene sequences.

[0423] In conclusion, tuf and atpD genes exhibit phylogenies consistent with 16S rDNA genes phylogeny. For example, they reveal that the family Enterobacteriaceae is monophyletic. Moreover, tuf and atpD distances provide a higher discriminating power than 16S rDNA distances. In fact, tuf and atpD genes discriminate well between different genospecies and are conserved between strains of the same genetic species in such a way that primers and molecular probes for diagnostic purposes could be designed. Preliminary studies support these observations and diagnostic tests based on tuf and atpD sequence data to identify enterobacteria are currently under development.

### Example 44

### Testing New Pairs of PCR Primers Selected from Two Species-Specific Genomic DNA Fragments which are Objects of Our Assigned U.S. Pat. No. 6,001,564

[0424] Objective. The goal of these experiments is to demonstrate that it is relatively easy for a person skilled in the art to find other PCR primer pairs from the species-specific fragments used as targets for detection and identification of a variety of microorganisms. In fact, we wish to prove that the PCR primers previously tested by our group and which are objects of the present patent application are not the only possible good choices for diagnostic purposes. For this example, we used diagnostic targets described in our assigned U.S. Pat. No. 6,001,564.

[0425] Experimental strategy. We have selected randomly two species-specific genomic DNA fragments for this experiment. The first one is the 705-bp fragment specific to Staphylococcus epidermidis (SEQ ID NO: 36 from U.S. Pat. No. 6,001,564) while the second one is the 466-bp fragment specific to Moraxella catarrhalis (SEQ ID NO: 29 from U.S. Pat. No. 6,001,564). Subsequently, we have selected from these two fragments a number of PCR primer pairs other than those previously tested. We have chosen 5 new primer pairs from each of these two sequences which are well dispersed along the DNA fragment (FIGS. 11 and 12). We have tested these primers for their specificity and compared them with the original primers previously tested. For the specificity tests, we have tested all bacterial species closely related to the target species based on phylogenetic analysis with three conserved genes (rRNA genes, tuf and atpD). The rational for selecting a restricted number of bacterial species to evaluate the specificity of the new primer pairs is based on the fact that the lack of specificity of a DNA-based assay is attributable to the detection of closely related species which are more similar at the nucleotide level. Based on the phylogenetic analysis, we have selected (i) species from the closely related genus Staphylococcus, Enterococcus, Streptococcus and Listeria to test the specificity of the S. epidermidis-specific PCR assays and (ii) species from the closely related genus Moraxella, Kingella and Neisseria to test the specificity of the M. catarrhalis-specific PCR assays.

### Materials and Methods

[0426] Bacterial strains. All bacterial strains used for these experiments were obtained from the American Type Culture Collection (ATCC, Rockville, Md.).

[0427] Genomic DNA isolation. Genomic DNA was purified from the ATCC reference strains by using the G-nome DNA kit (Bio 101 Inc., Vista, Calif.).

[0428] Oligonucleotide design and synthesis. PCR primers were designed with the help of the Oligo™ primer analysis software Version 4.0 (National Biosciences Inc., Plymouth, Minn.) and synthesized using a model 391 DNA synthesizer (Applied Biosystems, Foster City, Calif.).

[0429] PCR assays. All PCR assays were performed by using genomic DNA purified from reference strains obtained from the ATCC. One μl of purified DNA preparation (containing 0.01 to 1 ng of DNA per μl) was added directly into the PCR reaction mixture. The 20 μL PCR reactions contained final concentrations of 50 mM KCl, 10 mM Tris-HCl (pH 9.0), 0.1% Triton X-100, 2.5 mM MgCl₂, 0.4 μM of each primer, 200 μM of each of the four dNTPs and 0.5 unit of Taq DNA polymerase (Promega, Madison, Wis.) combined with the TaqStart™ antibody (Clontech Laboratories Inc., Palo Alto, Calif.). An internal control was integrated into all amplification reactions to verify the efficiency of the amplification reaction as well as to ensure that significant PCR inhibition was absent. Primers amplifying a region of 252 bp from a control plasmid added to each amplification reaction were used to provide the internal control. PCR reactions were then subjected to thermal cycling (3 min at 95° C. followed by 30 cycles of 1 second at 95° C. for the denaturation step and 30 seconds at 50 to 65° C. for the annealing-extension step) using a PTC-200 thermal cycler (MJ Research Inc., Watertown, Mass.). PCR amplification products were then analyzed by standard agarose gel (2%) electrophoresis. Amplification products were visualized in agarose gels containing 0.25 μg/mL of ethidium bromide under UV at 254 nm n.

### Results

[0430] Tables 21 and 22 show the results of specificity tests with the 5 new primer pairs selected from SEQ ID NO: 29 (specific to M. catarrhalis from U.S. Pat. No. 6,001,564) and SEQ ID NO: 36 (specific to S. epidermidis from U.S. Pat. No. 6,001,564), respectively. In order to evaluate the performance of these new primers pairs, we compared them in parallel with the original primer pairs previously tested.

[0431] For M. catarrhalis, all of the 5 selected PCR primer pairs were specific for the target species because none of the closely related species could be amplified (Table 21). In fact, the comparison with the original primer pair SEQ ID NO: 118+SEQ ID NO: 119 (from U.S. Pat. No. 6,001,564) revaled that all new pairs showed identical results in terms of specificity and sensitivity thereby suggesting their suitability for diagnostic purposes.

[0432] For S. epidermidis, 4 of the 5 selected PCR primer pairs were specific for the target species (Table 22). It should be noted that for 3 of these four primer pairs the annealing temperature had to be increased from 55° C. to 60 or 65° C. to attain specificity for S. epidermidis. Again the comparison with the original primer pair SEQ ID NO: 145+SEQ ID NO: 146 (from U.S. Pat. No. 6,001,564) revealed that these four primer pairs were as good as the original pair. Increasing the annealing temperature for the PCR amplification is well known by persons skilled in the art to be a very effective way to improve the specificity of a PCR assay (Persing et al., 1993, Diagnostic Molecular Microbiology: Principles and Applications, American Society for Microbiology, Washington, D.C.; Ehrlich and Greenberg, 1994, PCR-based Diagnostics in Infectious Disease, Blackwell Scientific Publications, Boston, Mass.). In fact, those skilled in the art are well aware of the fact that the annealing temperature is critical for the optimization of PCR assays. Only the primer pair VBsep3+VBsep4 amplified bacterial species other than S. epidemidis including the staphylococcal species S. capitis, S. cohnii, S. aureus, S. haemolyticus and S. hominis (Table 22). For this non-specific primer pair, increasing the annealing temperature from 55 to 65° C. was not sufficient to attain the desired specificity. One possible explanation for the fact that it appears slightly easier to select species-specific primers for M. catarrhalis than for S. epidermidis is that M. catarrhalis is more isolated in phylogenetic trees than S. epidermidis. The large number of coagulase negative staphylococcal species such as S. epidermidis is largely responsible for this phylogenetic clustering.

### Conclusion

[0433] These experiment clearly show that it is relatively easy for a person skilled in the art to select, from the species-specific DNA fragments selected as target for identification, PCR primer pairs suitable for diagnostic purposes other than those previously tested. The amplification conditions can be optimize by modifying critical variables such as the annealing temperature to attain the desired specificity and sensitivity. Consequently, we consider that it is legitimate to claim any possible primer sequences selected from the species-specific fragment and that it would be unfair to grant only the claims dealing with the primer pairs previously tested. By extrapolation, these results strongly suggest that it is also relatively easy for a person skilled in the art to select, from the species-specific DNA fragments, DNA probes suitable for diagnostic purposes other than those previously tested.

### Example 45

### Testing Modified Versions of PCR Primers Derived from the Sequence of Several Primers which are Objects of U.S. Pat. No. 6,001,564

[0434] Objective. The purpose of this project is to verify the efficiency of amplification by modified PCR primers derived from primers previously tested. The types of primer modifications to be tested include (i) variation of the sequence at one or more nucleotide positions and (ii) increasing or reducing the length of the primers. For this example, we used diagnostic targets described in U.S. Pat. No. 6,001,564.

### Experimental Strategy:

[0435] Testing Primers with Nucleotide Changes

[0436] We have designed 13 new primers which are derived from the S. epidermidis-specific SEQ ID NO: 146 from U.S. Pat. No. 6,001,564 (Table 23). These primers have been modified at one or more nucleotide positions. As shown in Table 23, the nucleotide changes were introduced all along the primer sequence. Furthermore, instead of modifying the primer at any nucleotide position, the nucleotide changes were introduced at the third position of each codon to better reflect potential genetic variations in vivo. It should be noted that no nucleotide changes were introduced at the 3′ end of the oligonucleotide primers because those skilled in the art are well aware of the fact that mismatches at the 3′ end should be avoided. (Persing et al., 1993, Diagnostic Molecular Microbiology: Principles and Applications, American Society for Microbiology, Washington, D.C.). All of these modified primers were tested in PCR assays in combination with SEQ ID NO: 145 from U.S. Pat. No. 6,001,564 and the efficiency of the amplification was compared with the original primer pair SEQ ID NO: 145+SEQ ID NO: 146 previously tested in U.S. Pat. No. 6,001,564.

### Testing Shorter or Longer Versions of Primers

[0437] We have designed shorter and longer versions of the original S. epidermidis-specific PCR primer pair SEQ ID NO: 145+146 from U.S. Pat. No. 6,001,564 (Table 24) as well as shorter versions of the original P. aeruginosa-specific primer pair SEQ ID NO: 83+84 from U.S. Pat. No. 6,001,564 (Table 25). As shown in Tables 24 and 25, both primers of each pair were shortened or lengthen to the same length. Again, those skilled in the art know that the melting temperature of both primers from a pair should be similar to avoid preferential binding at one primer binding site which is detrimental in PCR (Persing et al., 1993, Diagnostic Molecular Microbiology: Principles and Applications, American Society for Microbiology, Washington, D.C.; Ehrlich and Greenberg, 1994, PCR-based Diagnostics in Infectious Disease, Blackwell Scientific Publications, Boston, Mass.). All of these shorter or longer primer versions were tested in PCR assays and the efficiency of the amplification was compared with the original primer pair SEQ ID NOs 145 and 146.

### Materials and Methods

[0438] See the Materials and methods section of Example 44.

### Results

[0439] Testing Primers with Nucleotide Changes

[0440] The results of the PCR assays with the 13 modified versions of SEQ ID NO: 146 from U.S. Pat. No. 6,001,564 are shown in Table 23. The 8 modified primers having a single nucleotide variation showed an efficiency of amplification identical to the original primer pair based on testing with 3 different dilutions of genomic DNA. The four primers having two nucleotide variations and primer VBmut12 having 3 nucleotide changes also showed PCR results identical to those obtained with the original pair. Finally, primer VBmut13 with four nucleotide changes showed a reduction in sensitivity by approximately one log as compared with the original primer pair. However, reducing the annealing temperature from 55 to 50° C. gave an efficiency of amplification very similar to that observed with the original primer pair (Table 23). In fact, reducing the annealing temperature of PCR cycles represents an effective way to reduce the stringency of hybridization for the primers and consequently allows the binding of probes with mismatches (Persing et al., 1993, Diagnostic Molecular Microbiology: Principles and Applications, American Society for Microbiology, Washington, D.C.). Subsequently, we have confirmed the specificity of the PCR assays with each of these 13 modified versions of SEQ ID NO: 146 from U.S. Pat. No. 6,001,564 by performing amplifications from all bacterial species closely related to S. epidermidis which are listed in Table 22.

### Testing Shorter or Longer Versions of Primers

[0441] For these experiments, two primer pairs were selected: i) SEQ ID NO: 145+146 from U.S. Pat. No. 6,001,564 (specific to S. epidermidis) which are AT rich and ii) SEQ ID NO: 83+84 (specific to P. aeruginosa) which are GC rich. For the AT rich sequence, primers of 15 to 30 nucleotide in length were designed (Table 24) while for the GC rich sequences, primers of 13 to 19 nucleotide in length were designed (Table 25).

[0442] Table 24 shows that, for an annealing temperature of 55° C., the 30- 25-, 20- and 17-nucleotide versions of SEQ ID NO: 145 and 146 from U.S. Pat. No. 6,001,564 all showed identical results as compared with the original primer pair except that the 17-nucleotide version amplified slightly less efficiently the S. epidermidis DNA. Reducing the annealing temperature from 55 to 45° C. for the 17-nucleotide version allowed to increase the amplification efficiency to a level very similar to that with the original primer pair (SEQ ID NO: 145+146 from U.S. Pat. No. 6,001,564). Regarding the 15-nucleotide version, there was amplification of S. epidermidis DNA only when the annealing temperature was reduced to 45° C. Under those PCR conditions the assay remained S. epidermidis-specific but the amplification signal with S. epidermidis DNA was slightly lower as compared with the original primer pair. Subsequently, we have further confirmed the specificity of the shorter or longer versions by amplifying DNA from all bacterial species closely related to S. epidermidis which are listed in Table 22.

[0443] Table 25 shows that, for an annealing temperature of 55° C., all shorter versions of SEQ ID NO: 83 and 84 from U.S. Pat. No. 6,001,564 showed identical PCR results as compared with the original primer pair. As expected, these results show that it is simpler to reduce the length of GC rich as compared with AT rich. This is attributable to the fact that GC binding is more stable than AT binding.

### Conclusion

[0444] Testing Primers with Nucleotide Changes

[0445] The above experiments clearly show that PCR primers may be modified at one or more nucleotide positions without affecting the specificity and the sensitivity of the PCR assay. These results strongly suggest that a given oligonucleotide can detect variant genomic sequences from the target species. In fact, the nucleotide changes in the selected primers were purposely introduced at the third position of each codon to mimic nucleotide variation in genomic DNA. Thus we conclude that it is justified to claim “a variant thereof” for i) the SEQ IDs of the fragments and oligonucleotides which are object of the present patent application and ii) genomic variants of the target species.

### Testing Shorter or Longer Versions of Primers

[0446] The above experiments clearly show that PCR primers may be shorter or longer without affecting the specificity and the sensitivity of the PCR assay. We have showed that oligonucleotides ranging in sizes from 13 to 30 nucleotides may be as specific and sensitive as the original primer pair from which they were derived. Consequently, these results suggest that it is not exaggerated to claim sequences having at least 12 nucleotide in length.

[0447] This invention has been described herein above, and it is readily apparent that modifications can be made thereto without departing from the spirit of this invention. These modifications are under the scope of this invention, as defined in the appended claims.

TABLE 1
Distribution (%) of nosocomial pathogens for various
human infections in USA (1990-1992)¹.

| Pathogen | UTI² | SSI³ | BSI⁴ | Pneumonia | CSF⁵ |
|---|---|---|---|---|---|
| Escherichia coli | 27 | 9 | 5 | 4 | 2 |
| Staphylococcus aureus | 2 | 21 | 17 | 21 | 2 |
| Staphylococcus epidermidis | 2 | 6 | 20 | 0 | 1 |
| Enterococcus faecalis | 16 | 12 | 9 | 2 | 0 |
| Enterococcus faecium | 1 | 1 | 0 | 0 | 0 |
| Pseudomonas aeruginosa | 12 | 9 | 3 | 18 | 0 |
| Klebsiella pneumoniae | 7 | 3 | 4 | 9 | 0 |
| Proteus mirabilis | 5 | 3 | 1 | 2 | 0 |
| Streptococcus pneumoniae | 0 | 0 | 3 | 1 | 18 |
| Group B Streptococci | 1 | 1 | 2 | 1 | 6 |
| Other treptococci | 3 | 5 | 2 | 1 | 3 |
| Haemophilus influenzae | 0 | 0 | 0 | 6 | 45 |
| Neisseria meningitidis | 0 | 0 | 0 | 0 | 14 |
| Listeria monocytogenes | 0 | 0 | 0 | 0 | 3 |
| Other enterococci | 1 | 1 | 0 | 0 | 0 |
| Other staphylococci | 2 | 8 | 13 | 2 | 0 |
| Candida albicans | 9 | 3 | 5 | 5 | 0 |
| Other Candida | 2 | 1 | 3 | 1 | 0 |
| Enterobacter sp. | 5 | 7 | 4 | 12 | 2 |
| Acinetobacter sp. | 1 | 1 | 2 | 4 | 2 |
| Citrobacter sp. | 2 | 1 | 1 | 1 | 0 |
| Serratia marcescens | 1 | 1 | 1 | 3 | 1 |
| Other klebsiella | 1 | 1 | 1 | 2 | 1 |
| Others | 0 | 6 | 4 | 5 | 0 |

¹Data recorded by the National Nosocomial Infections Surveillance (NNIS) from 80 hospitals (Emori and Gaynes, 1993, Clin. Microbiol. Rev., 6: 428-442).
²Urinary tract infection.
³Surgical site infection.
⁴Bloodstream infection.
⁵Cerebrospinal fluid.

TABLE 2
Distribution (%) of bloodstream infection pathogens in Quebec
(1995), Canada (1992), UK (1969-1988) and USA (1990-1992).

| | | | UK³ | | |
|---|---|---|---|---|---|
| | | | Com- | | USA⁴ |
| | | | munity- | Hospital- | Hospital- |
| Organism | Quebec¹ | Canada² | acquired | acquired | acquired |
| E. coli | 15.6 | 53.8 | 24.8 | 20.3 | 5.0 |
| S. epidermidis | 25.8 | — | 0.5 | 7.2 | 31.0 |
| and other | | | | | |
| CoNS⁵ | | | | | |
| S. aureus | 9.6 | — | 9.7 | 19.4 | 16.0 |
| S. pneumoniae | 6.3 | — | 22.5 | 2.2 | — |
| E. faecalis | 3.0 | — | 1.0 | 4.2 | — |
| E. faecium | 2.6 | — | 0.2 | 0.5 | — |
| Enterococcus | — | — | — | — | 9.0 |
| sp. | | | | | |
| H. influenzae | 1.5 | — | 3.4 | 0.4 | — |
| P. aeruginosa | 1.5 | 8.2 | 1.0 | 8.2 | 3.0 |
| K. pneumoniae | 3.0 | 11.2 | 3.0 | 9.2 | 4.0 |
| P. mirabilis | — | 3.9 | 2.8 | 5.3 | 1.0 |
| S. pyogenes | — | — | 1.9 | 0.9 | — |
| Enterobacter | 4.1 | 5.5 | 0.5 | 2.3 | 4.0 |
| sp. | | | | | |
| Candida sp. | 8.5 | — | — | 1.0 | 8.0 |
| Others | 18.5 | 17.4 | 28.7 | 18.9 | 19.0 |

¹Data obtained for 270 isolates collected at the Centre Hospitalier de I'Université Laval (CHUL) during a 5 month period (May to October 1995).
²Data from 10 hospitals throughout Canada representing 941 gram-negative isolates. (Chamberland et al., 1992, Clin. Infect. Dis., 15: 615-628).
³Data from a 20-year study (1969-1988) for nearly 4000 isolates. (Eykyn et al., 1990, J. Antimicrob. Chemother., Suppl. C, 25: 41-58).
⁴Data recorded by the National Nosocomial Infections Surveillance (NNIS) from 80 hospitals (Emori and Gaynes, 1993, Clin. Microbiol. Rev., 6: 428-442).
⁵Coagulase-negative staphylococci.

TABLE 3
Distribution of positive and negative clinical specimens tested at the
microbiology laboratory of the CHUL (February 1994-January 1995).

| | | | % of |
|---|---|---|---|
| Clinical specimens | No. of samples | % of positive | negative |
| and/or sites | tested (%) | specimens | specimens |
| Urine | 17,981 (54.5) | 19.4 | 80.6 |
| Blood culture/marrow | 10,010 (30.4) | 6.9 | 93.1 |
| Sputum | 1,266 (3.8) | 68.4 | 31.6 |
| Superficial pus | 1,136 (3.5) | 72.3 | 27.7 |
| Cerebrospinal fluid | 553 (1.7) | 1.0 | 99.0 |
| Synovial fluid | 523 (1.6) | 2.7 | 97.3 |
| Respiratory tract | 502 (1.5) | 56.6 | 43.4 |
| Deep pus | 473 (1.4) | 56.8 | 43.2 |
| Ears | 289 (0.9) | 47.1 | 52.9 |
| Pleural and pericardial fluid | 132 (0.4) | 1.0 | 99.0 |
| Peritoneal fluid | 101 (0.3) | 28.6 | 71.4 |
| Total: | 32,966 (100.0) | 20.0 | 80.0 |

TABLE 4
Example of microbial species for which tuf and/or atpD and/or recA
nucleic acids and/or sequences are used in the present invention.
Bacterial species

Abiotrophia adiacens
Abiotrophia defectiva
Achromobacter xylosoxidans subsp. denitrificans
Acetobacterium woodi
Acetobacter aceti
Acetobacter altoacetigenes
Acetobacter polyoxogenes
Acholeplasma laidlawii
Acidothermus cellulolyticus
Acidiphilum facilis
Acinetobacter baumannii
Acinetobacter calcoaceticus
Acinetobacter lwoffii
Actinomyces meyeri
Aerococcus viridans
Aeromonas hydrophila
Aeromonas salmonicida
Agrobacterium radiobacter
Agrobacterium tumefaciens
Alcaligenes faecalis subsp. faecalis
Allochromatium vinosum
Anabaena variabilis
Anacystis nidulans
Anaerorhabdus furcosus
Aquifex aeolicus
Aquifex pyrophilus
Arcanobacterium haemolyticum
Archaeoglobus fulgidus
Azotobacter vinelandii
Bacillus anthracis
Bacillus cereus
Bacillus firmus
Bacillus halodurans
Bacillus megaterium
Bacillus mycoides
Bacillus pseudomycoides
Bacillus stearothermophilus
Bacillus subtilis
Bacillus thuringiensis
Bacillus weihenstephanensis
Bacteroides distasonis
Bacteroides fragilis
Bacteroides forsythus
Bacteroides ovatus
Bacteroides vulgatus
Bartonella henselae
Bifidobacterium adolescentis
Bifidobacterium breve
Bifidobacterium dentium
Bifidobacterium longum
Blastochloris viridis
Borrelia burgdorferi
Bordetella pertussis
Bordetella bronchiseptica
Brucella abortus
Brevibacterium linens
Brevibacterium flavum
Brevundimonas diminuta
Buchnera aphidicola
Budvicia aquatica
Burkholderia cepacia
Burkholderia mallei
Burkholderia pseudomallei
Buttiauxella agrestis
Butyrivibrio fibrisolvens
Campylobacter coli
Campylobacter curvus
Campylobacter fetus subsp. fetus
Campylobacter fetus subsp. venerealis
Campylobacter gracilis
Campylobacter jejuni
Campylobacter jejuni subsp. doylei
Campylobacter jejuni subsp. jejuni
Campylobacter lari
Campylobacter rectus
Campylobacter sputorum subsp. sputorum
Campylobacter upsaliensis
Cedecea davisae
Cedecea lapagei
Cedecea neteri
Chlamydia pneumoniae
Chlamydia psittaci
Chlamydia trachomatis
Chlorobium vibrioforme
Chloroflexus aurantiacus
Chryseobacterium meningosepticum
Citrobacter amalonaticus
Citrobacter braakii
Citrobacter farmeri
Citrobacter freundii
Citrobacter koseri
Citrobacter sedlakii
Citrobacter werkmanii
Citrobacter youngae
Clostridium acetobutylicum
Clostridium beijerinckii
Clostridium bifermentans
Clostridium botulinum
Clostridium difficile
Clostridium innocuum
Clostridium histolyticum
Clostridium novyi
Clostridium septicum
Clostridium perfringens
Clostridium ramosum
Clostridium tertium
Clostridium tetani
Comamonas acidovorans
Corynebacterium accolens
Corynebacterium bovis
Corynebacterium cervicis
Corynebacterium diphtheriae
Corynebacterium flavescens
Corynebacterium genitalium
Corynebacterium glutamicum
Corynebacterium jeikeium
Corynebacterium kutscheri
Corynebacterium minutissimum
Corynebacterium mycetoides
Corynebacterium pseudodiphtheriticum
Corynebacterium pseudogenitalium
Corynebacterium pseudotuberculosis
Corynebacterium renale
Corynebacterium striatum
Corynebacterium ulcerans
Corynebacterium urealyticum
Corynebacterium xerosis
Coxiella burnetii
Cytophaga lytica
Deinococcus radiodurans
Deinonema sp.
Edwardsiella hoshinae
Edwardsiella tarda
Ehrlichia canis
Ehrlichia risticii
Eikenella corrodens
Enterobacter aerogenes
Enterobacter agglomerans
Enterobacter amnigenus
Enterobacter asburiae
Enterobacter cancerogenus
Enterobacter cloacae
Enterobacter gergoviae
Enterobacter hormaechei
Enterobacter sakazakii
Enterococcus avium
Enterococcus casseliflavus
Enterococcus cecorum
Enterococcus columbae
Enterococcus dispar
Enterococcus durans
Enterococcus faecalis
Enterococcus faecium
Enterococcus flavescens
Enterococcus gallinarum
Enterococcus hirae
Enterococcus malodoratus
Enterococcus mundtii
Enterococcus pseudoavium
Enterococcus raffinosus
Enterococcus saccharolyticus
Enterococcus solitarius
Enterococcus sulfureus
Clostridium sordellii
Erwinia amylovora
Erwinia carotovora
Escherichia coli
Escherichia fergusonii
Escherichia hermannii
Escherichia vulneris
Eubacterium lentum
Eubacterium nodatum
Ewingella americana
Francisella tularensis
Frankia alni
Fervidobacterium islandicum
Fibrobacter succinogenes
Flavobacterium ferrigeneum
Flexistipes sinusarabici
Fusobacterium gonidiaformans
Fusobacterium necrophorum subsp. necrophorum
Fusobacterium nucleatum subsp. polymorphum
Gardnerella vaginalis
Gemella haemolysans
Gemella morbillorum
Globicatella sanguis
Gloeobacter violaceus
Gloeothece sp.
Gluconobacter oxydans
Haemophilus actinomycetemcomitans
Haemophilus aphrophilus
Haemophilus ducreyi
Haemophilus haemolyticus
Haemophilus influenzae
Haemophilus parahaemolyticus
Haemophilus parainfluenzae
Haemophilus paraphrophilus
Haemophilus segnis
Hafnia alvei
Halobacterium marismortui
Halobacterium salinarum
Haloferax volcanii
Helicobacter pylori
Herpetoshiphon aurantiacus
Kingella kingae
Klebsiella ornithinolytica
Klebsiella oxytoca
Klebsiella planticola
Klebsiella pneumoniae subsp. ozaenae
Klebsiella pneumoniae subsp. pneumoniae
Klebsiella pneumoniae subsp. rhinoscleromatis
Klebsiella terrigena
Kluyvera ascorbata
Kluyvera cryocrescens
Kluyvera georgiana
Kocuria kristinae
Lactobacillus acidophilus
Lactobacillus garvieae
Lactobacillus paracasei
Lactobacillus casei subsp. casei
Lactococcus garvieae
Lactococcus lactis
Lactococcus lactis subsp. lactis
Legionella micdadei
Legionella pneumophila subsp. pneumophila
Leminorella grimontii
Leminorella richardii
Leptospira biflexa
Leptospira interrogans
Leuconostoc mesenteroides subsp. dextranicum
Listeria innocua
Listeria ivanovii
Listeria monocytogenes
Listeria seeligeri
Macrococcus caseolyticus
Magnetospirillum magnetotacticum
Megamonas hypermegale
Methanobacterium thermoautotrophicum
Methanococcus jannaschii
Methanococcus vannielii
Methanosarcina barkeri
Methanosarcina jannaschii
Methylobacillus flagellatum
Methylomonas clara
Micrococcus luteus
Micrococcus lylae
Mitsuokella multacidus
Mobiluncus curtisii subsp. holmesii
Moellerella thermoacetica
Moellerella wisconsensis
Moorella thermoacetica
Moraxella catarrhalis
Moraxella osloensis
Morganella morganii subsp. morganii
Mycobacterium avium
Mycobacterium bovis
Mycobacterium gordonae
Mycobacterium kansasii
Mycobacterium leprae
Mycobacterium terrae
Mycobacterium tuberculosis
Mycoplasma capricolum
Mycoplasma gallisepticum
Mycoplasma genitalium
Mycoplasma hominis
Mycoplasma pirum
Mycoplasma mycoides
Mycoplasma pneumoniae
Mycoplasma pulmonis
Mycoplasma salivarium
Myxococcus xanthus
Neisseria animalis
Neisseria canis
Neisseria cinerea
Neisseria cuniculi
Neisseria elongata subsp. elongata
Neisseria elongata subsp. intermedia
Neisseria flava
Neisseria flavescens
Neisseria gonorrhoeae
Neisseria lactamica
Leclercia adecarboxylata
Neisseria meningitidis
Neisseria mucosa
Neisseria perflava
Neisseria pharyngis var. flava
Neisseria polysaccharea
Neisseria sicca
Neisseria subflava
Neisseria weaveri
Obesumbacterium proteus
Ochrobactrum anthropi
Pantoea agglomerans
Pantoea dispersa
Paracoccus denitrificans
Pasteurella multocida
Pectinatus frisingensis
Peptococcus niger
Peptostreptococcus anaerobius
Peptostreptococcus asaccharolyticus
Peptostreptococcus prevotii
Phormidium ectocarpi
Pirellula marina
Planobispora rosea
Plesiomonas shigelloides
Plectonema boryanum
Porphyromonas asaccharolytica
Porphyromonas gingivalis
Pragia fontium
Prevotella buccalis
Prevotella melaninogenica
Prevotella oralis
Prevotella ruminocola
Prochlorothrix hollandica
Propionibacterium acnes
Propionigenium modestum
Proteus mirabilis
Proteus penneri
Proteus vulgaris
Providencia alcalifaciens
Providencia rettgeri
Providencia rustigianii
Providencia stuartii
Pseudomonas aeruginosa
Pseudomonas fluorescens
Pseudomonas putida
Pseudomonas stutzeri
Psychrobacter phenylpyruvicum
Pyrococcus abyssi
Rahnella aquatilis
Rickettsia prowazekii
Rhizobium leguminosarum
Rhizobium phaseoli
Rhodobacter capsulatus
Rhodobacter sphaeroides Rhodopseudomonas
palustris
Rhodospirillum rubrum
Ruminococcus albus
Ruminococcus bromii
Salmonella bongori
Salmonella choleraesuis subsp. arizonae
Salmonella choleraesuis subsp choleraesuis
Salmonella choleraesuis subsp. diarizonae
Salmonella choleraesuis subsp. houtenae
Salmonella choleraesuis subsp. indica
Salmonella choleraesuis subsp. salamae
Serpulina hyodysenteriae
Serratia ficaria
Serratia fonticola
Serratia grimesii
Serratia liquefaciens
Serratia marcescens
Serratia odorifera
Serratia plymuthica
Serratia rubidaea
Shewanella putrefaciens
Shigella boydii
Shigella dysenteriae
Shigella flexneri
Shigella sonnei
Sinorhizobium meliloti
Spirochaeta aurantia
Staphylococcus aureus
Staphylococcus aureus subsp. aureus
Staphylococcus auricularis
Staphylococcus capitis subsp. capitis
Staphylococcus cohnii subsp. cohnii
Staphylococcus epidermidis
Staphylococcus haemolyticus
Staphylococcus hominis
Staphylococcus hominis subsp. hominis
Staphylococcus lugdunensis
Staphylococcus saprophyticus
Staphylococcus sciuri subsp. sciuri
Staphylococcus simulans
Staphylococcus warneri
Stigmatella aurantiaca
Stenotrophomonas maltophilia
Streptococcus acidominimus
Streptococcus agalactiae
Streptococcus anginosus
Streptococcus bovis
Streptococcus cricetus
Streptococcus cristatus
Streptococcus downei
Streptococcus dysgalactiae
Streptococcus equi subsp. equi
Streptococcus ferus
Streptococcus gordonii
Streptococcus macacae
Streptococcus mitis
Streptococcus mutans
Streptococcus oralis
Streptococcus parasanguinis
Streptococcus pneumoniae
Streptococcus pyogenes
Streptococcus ratti
Streptococcus salivarius
Streptococcus salivarius subsp. thermophilus
Streptococcus sanguinis
Streptococcus sobrinus
Streptococcus suis
Streptococcus uberis
Streptococcus vestibularis
Streptomyces anbofaciens
Streptomyces aureofaciens
Streptomyces cinnamoneus
Streptomyces coelicolor
Streptomyces collinus
Streptomyces lividans
Streptomyces netropsis
Streptomyces ramocissimus
Streptomyces rimosus
Streptomyces venezuelae
Succinivibrio dextrinosolvens
Synechococcus sp.
Synechocystis sp.
Tatumella ptyseos
Taxeobacter occealus
Tetragenococcus halophilus
Thermoplasma acidophilum
Thermotoga maritima
Thermus aquaticus
Thermus thermophilus
Thiobacillus ferrooxidans
Thiomonas cuprina
Trabulsiella guamensis
Treponema pallidum
Ureaplasma urealyticum
Veillonella parvula
Vibrio alginolyticus
Vibrio anguillarum
Vibrio cholerae
Vibrio mimicus
Wolinella succinogenes
Xanthomonas citri
Xanthomonas oryzae
Xenorhabdus bovieni
Xenorhabdus nematophilus
Yersinia bercovieri
Yersinia enterocolitica
Yersinia frederiksensii
Yersinia intermedia
Yersinia pestis
Yersinia pseudotuberculosis
Yersinia rohdei
Yokenella regensburgei
Zoogloea ramigera

Fungal species

Absidia corymbifera
Absidia glauca
Alternaria alternata
Arxula adeninivorans
Aspergillus flavus
Aspergillus fumigatus
Aspergillus nidulans
Aspergillus niger
Aspergillus oryzae
Aspergillus terreus
Aspergillus versicolor
Aureobasidium pullulans
Basidiobolus ranarum
Bipolaris hawaiiensis
Bilophila wadsworthia
Blastoschizomyces capitatus
Blastomyces dermatitidis
Candida albicans
Candida catenulata
Candida dubliniensis
Candida famata
Candida glabrata
Candida guilliermondii
Candida haemulonii
Candida inconspicua
Candida kefyr
Candida krusei
Candida lambica
Candida lusitaniae
Candida norvegica
Candida norvegensis
Candida parapsilosis
Candida rugosa
Candida sphaerica
Candida tropicalis
Candida utilis
Candida viswanathii
Candida zeylanoides
Cladophialophora carrionii
Coccidioides immitis
Coprinus cinereus
Cryptococcus albidus
Cryptococcus humicolus
Cryptococcus laurentii
Cryptococcus neoformans
Cunninghamella bertholletiae
Curvularia lunata
Emericella nidulans
Emmonsia parva
Eremothecium gossypii
Exophiala dermatitidis
Exophiala jeanselmei
Exophiala moniliae
Exserohilum rostratum
Eremothecium gossypii
Fonsecaea pedrosoi
Fusarium moniliforme
Fusarium oxysporum
Fusarium solani
Geotrichum sp.
Histoplasma capsulatum
Hortaea werneckii
Issatchenkia orientalis Kudrjanzev
Kluyveromyces lactis
Malassezia furfur
Malassezia pachydermatis
Malbranchea filamentosa
Metschnikowia pulcherrima
Microsporum audouinii
Microsporum canis
Mucor circinelloides
Neurospora crassa
Paecilomyces lilacinus
Paracoccidioides brasiliensis
Penicillium marneffei
Phialaphora verrucosa
Pichia anomala
Piedraia hortai
Podospora anserina
Podospora curvicolla
Puccinia graminis
Pseudallescheria boydii
Reclinomonas americana
Rhizomucor racemosus
Rhizopus oryzae
Rhodotorula minuta
Rhodotorula mucilaginosa
Saccharomyces cerevisiae
Saksenaea vasiformis
Schizosaccharomyces pombe
Scopulariopsis koningii
Sordaria macrospora
Sporobolomyces salmonicolor
Sporothrix schenckii
Stephanoascus ciferrii
Syncephalastrum racemosum
Trichoderma reesei
Trichophyton mentagrophytes
Trichophyton rubrum
Trichophyton tonsurans
Trichosporon cutaneum
Ustilago maydis
Wangiella dermatitidis
Yarrowia lipolytica

Parasitical species

Babesia bigemina
Babesia bovis
Babesia microti
Blastocystis hominis
Crithidia fasciculata
Cryptosporidium parvum
Entamoeba histolytica
Giardia lamblia
Kentrophoros sp.
Leishmania aethiopica
Leishmania amazonensis
Leishmania braziliensis
Leishmania donovani
Leishmania infantum
Leishmania enriettii
Leishmania gerbilli
Leishmania guyanensis
Leishmania hertigi
Leishmania major
Leishmania mexicana
Leishmania panamensis
Leishmania tarentolae
Leishmania tropica
Neospora caninum
Onchocerca volvulus
Plasmodium berghei
Plasmodium falciparum
Plasmodium knowlesi
Porphyra purpurea
Toxoplasma gondii
Treponema pallidum
Trichomonas tenax
Trichomonas vaginalis
Trypanosoma brucei
Trypanosoma brucei subsp. brucei
Trypanosoma congolense
Trypanosoma cruzi

TABLE 5
Antimicrobial agents resistance genes selected for diagnostic purposes

| Gene | Antimicrobial agent | Bacteria¹ | ACCESSION NO. | SEQ ID NO. |
|---|---|---|---|---|
| aac(3)-Ib² | Aminoglycosides | Enterobacteriaceae | L06157 | |
| | | Pseudomonads | | |
| aac(3)-IIb² | Aminoglycosides | Enterobacteriaceae, | M97172 | |
| | | Pseudomonads | | |
| aac(3)-IVa² | Aminoglycosides | Enterobacteriaceae | X01385 | |
| aac(3)-VIa² | Aminoglycosides | Enterobacteriaceae, | M88012 | |
| | | Pseudomonads | | |
| aac(2′)-1a² | Aminoglycosides | Enterobacteriaceae, | X04555 | |
| | | Pseudomonads | | |
| aac(6′)-aph(2″)² | Aminoglycosides | Enterococcus sp., | | 83-86³ |
| | | Staphylococcus sp. | | |
| aac(6′)-Ia,² | Aminoglycosides | Enterobacteriaceae, | M18967 | |
| | | Pseudomonads | | |
| aac(6′)-Ic² | Aminoglycosides | Enterobacteriaceae, | M94066 | |
| | | Pseudomonads | | |
| aac(6′)-IIa² | Aminoglycosides | Pseudomonads | | 112⁴ |
| aadB [ant(2″)-Ia²] | Aminoglycosides | Enterobacteriaceae | | 53-54³ |
| aacC1 [aac(3)-Ia²] | Aminoglycosides | Pseudomonads | | 55-56³ |
| aacC2 [aac(3)-IIa²] | Aminoglycosides | Pseudomonads | | 57-58³ |
| aacC3 [aac(3)-III²] | Aminoglycosides | Pseudomonads | | 59-60³ |
| aacA4 [aac(6′)-Ib²] | Aminoglycosides | Pseudomonads | | 65-66³ |
| ant(3″)-Ia² | Aminoglycosides | Enterobacteriaceae, | X02340 | |
| | | Enterococcus sp., | M10241 | |
| | | Staphylococcus sp. | | |
| ant(4′)-Ia² | Aminoglycosides | Staphylococcus sp. | V01282 | |
| aph(3′)-Ia² | Aminoglycosides | Enterobacteriaceae, | J01839 | |
| | | Pseudomonads | | |
| aph(3′)-IIa² | Aminoglycosides | Enterobacteriaceae, | V00618 | |
| | | Pseudomonads | | |
| aph(3′)-IIIa² | Aminoglycosides | Enterococcus sp., | V01547 | |
| | | Staphylococcus sp. | | |
| aph(3′)-VIa² | Aminoglycosides | Enterobacteriaceae, | X07753 | |
| | | Pseudomonads | | |
| rpsL² | Streptomycin | M. tuberculosis, | X80120 | |
| | | M. avium complex | U14749 | |
| | | | X70995 | |
| | | | L08011 | |
| bla_{OXA}^{5,6} | β-lactams | Enterobacteriaceae, | Y10693 | 110⁴ |
| | | Pseudomonads | AJ238349 | |
| | | | AJ009819 | |
| | | | X06046 | |
| | | | X03037 | |
| | | | X07260 | |
| | | | U13880 | |
| | | | X75562 | |
| | | | AF034958 | |
| | | | J03427 | |
| | | | Z22590 | |
| | | | U59183 | |
| | | | L38523 | |
| | | | U63835 | |
| | | | AF043100 | |
| | | | AF060206 | |
| | | | U85514 | |
| | | | AF043381 | |
| | | | AF024602 | |
| | | | AF064820 | |
| bla_{ROB}⁵ | β-lactams | Haemophilus sp. | | 45-48³ |
| bla_{SHV}^{5,6} | β-lactams | Enterobacteriacea, | AF124984 | 41-44³ |
| | | Pseudomonas aeruginosa | AF148850 | |
| | | | M59181 | |
| | | | X98099 | |
| | | | M33655 | |
| | | | AF148851 | |
| | | | X53433 | |
| | | | L47119 | |
| | | | AF074954 | |
| | | | X53817 | |
| | | | AF096930 | |
| | | | X55640 | |
| | | | Y11069 | |
| | | | U20270 | |
| | | | U92041 | |
| | | | S82452 | |
| | | | X98101 | |
| | | | X98105 | |
| | | | AF164577 | |
| | | | AJ011428 | |
| | | | AF116855 | |
| | | | AB023477 | |
| | | | AF293345 | |
| | | | AF227204 | |
| | | | AF208796 | |
| | | | AF132290 | |
| bla_{TEM}^{5,6} | β-lactams | Enterobacteriaceae, | AF012911 | 37-40³ |
| | | Neisseria sp., | U48775 | |
| | | Haemophilus sp. | AF093512 | |
| | | | AF052748 | |
| | | | X64523 | |
| | | | Y13612 | |
| | | | X57972 | |
| | | | AF157413 | |
| | | | U31280 | |
| | | | U36911 | |
| | | | U48775 | |
| | | | V00613 | |
| | | | X97254 | |
| | | | AJ012256 | |
| | | | X04515 | |
| | | | AF126482 | |
| | | | U09188 | |
| | | | M88143 | |
| | | | Y14574 | |
| | | | AF188200 | |
| | | | AJ251946 | |
| | | | Y17581 | |
| | | | Y17582 | |
| | | | Y17583 | |
| | | | M88143 | |
| | | | U37195 | |
| | | | Y17584 | |
| | | | X64523 | |
| | | | U95363 | |
| | | | Y10279 | |
| | | | Y10280 | |
| | | | Y10281 | |
| | | | AF027199 | |
| | | | AF104441 | |
| | | | AF104442 | |
| | | | AF062386 | |
| | | | X57972 | |
| | | | AF047171 | |
| | | | AF188199 | |
| | | | AF157553 | |
| | | | AF190694 | |
| | | | AF190695 | |
| | | | AF190693 | |
| | | | AF190692 | |
| bla_{SHV}^{5,6} | β-lactams | Enterobacteriacea, | AF124984 | 41-44³ |
| | | Pseudomonas aeruginosa | AF148850 | |
| | | | M59181 | |
| | | | X98099 | |
| | | | M33655 | |
| | | | AF148851 | |
| | | | X53433 | |
| | | | L47119 | |
| | | | AF074954 | |
| | | | X53817 | |
| | | | AF096930 | |
| | | | X55640 | |
| | | | Y11069 | |
| | | | U20270 | |
| | | | U92041 | |
| | | | S82452 | |
| | | | X98101 | |
| | | | X98105 | |
| | | | AF164577 | |
| | | | AJ011428 | |
| | | | AF116855 | |
| | | | AB023477 | |
| | | | AF293345 | |
| | | | AF227204 | |
| | | | AF208796 | |
| | | | AF132290 | |
| bla_{TEM}^{5,6} | β-lactams | Enterobacteriaceae, | AF012911 | 37-40³ |
| | | Neisseria sp., | U48775 | |
| | | Haemophilus sp. | AF093512 | |
| | | | AF052748 | |
| | | | X64523 | |
| | | | Y13612 | |
| | | | X57972 | |
| | | | AF157413 | |
| | | | U31280 | |
| | | | U36911 | |
| | | | U48775 | |
| | | | V00613 | |
| | | | X97254 | |
| | | | AJ012256 | |
| | | | X04515 | |
| | | | AF126482 | |
| | | | U09188 | |
| | | | M88143 | |
| | | | Y14574 | |
| | | | AF188200 | |
| | | | AJ251946 | |
| | | | Y17581 | |
| | | | Y17582 | |
| | | | Y17583 | |
| | | | M88143 | |
| | | | U37195 | |
| | | | Y17584 | |
| | | | X64523 | |
| | | | U95363 | |
| | | | Y10279 | |
| | | | Y10280 | |
| | | | Y10281 | |
| | | | AF027199 | |
| | | | AF104441 | |
| | | | AF104442 | |
| | | | AF062386 | |
| | | | X57972 | |
| | | | AF047171 | |
| | | | AF188199 | |
| | | | AF157553 | |
| | | | AF190694 | |
| | | | AF190695 | |
| | | | AF190693 | |
| | | | AF190692 | |
| bla_{CARB}⁵ | β-lactams | Pseudomonas sp., | J05162 | |
| | | Enterobacteriaceae | S46063 | |
| | | | M69058 | |
| | | | U14749 | |
| | | | D86225 | |
| | | | D13210 | |
| | | | Z18955 | |
| | | | AF071555 | |
| | | | AF153200 | |
| | | | AF030945 | |
| bla_{CTX-M-1}⁵ | β-lactams | Enterobacteriaceae | X92506 | |
| bla_{CTX-M-2}⁵ | β-lactams | Enterobacteriaceae | X92507 | |
| bla_{CMY-2}¹ | β-lactams | Enterobacteriaceae | X91840 | |
| | | | AJ007826 | |
| | | | AJ011293 | |
| | | | AJ011291 | |
| | | | Y17716 | |
| | | | Y16783 | |
| | | | Y16781 | |
| | | | Y15130 | |
| | | | U77414 | |
| | | | S83226 | |
| | | | Y15412 | |
| | | | X78117 | |
| bla_{IMP}⁵ | β-lactams | Enterobacteriaceae, | AJ223604 | |
| | | Pseudomonas aeruginosa | S71932 | |
| | | | D50438 | |
| | | | D29636 | |
| | | | X98393 | |
| | | | AB010417 | |
| | | | D78375 | |
| bla_{PER-1}⁵ | β-lactams | Enterobacteriaceae, | Z21957 | |
| | | Pseudomodanaceae | | |
| bla_{PER-2}⁷ | β-lactams | Enterobacteriaceae | X93314 | |
| blaZ¹² | β-lactams | Enterococcus sp., | | 111⁴ |
| | | Staphylococcus sp. | | |
| mecA¹² | β-lactams | Staphylococcus sp. | | 97-98³ |
| pbp1a¹³ | β-lactams | Streptococcus pneumoniae | M90527 | 1004-1018, |
| | | | X67872 | 1648, 2056-2064, |
| | | | AB006868 | 2273-2276 |
| | | | AB006874 | |
| | | | X67873 | |
| | | | AB006878 | |
| | | | AB006875 | |
| | | | AB006877 | |
| | | | AB006879 | |
| | | | AF046237 | |
| | | | AF046235 | |
| | | | AF026431 | |
| | | | AF046232 | |
| | | | AF046233 | |
| | | | AF046236 | |
| | | | X67871 | |
| | | | Z49095 | |
| | | | AF046234 | |
| | | | AB006873 | |
| | | | X67866 | |
| | | | X67868 | |
| | | | AB006870 | |
| | | | AB006869 | |
| | | | AB006872 | |
| | | | X67870 | |
| | | | AB006871 | |
| | | | X67867 | |
| | | | X67869 | |
| | | | AB006876 | |
| | | | AF046230 | |
| | | | AF046238 | |
| | | | Z49094 | |
| pbp2b¹³ | β-lactams | Streptococcus pneumoniae | X16022 | 1019-1033 |
| | | | M25516 | |
| | | | M25518 | |
| | | | M25515 | |
| | | | U20071 | |
| | | | U20084 | |
| | | | U20082 | |
| | | | U20067 | |
| | | | U20079 | |
| | | | Z22185 | |
| | | | U20072 | |
| pbp2b¹³ | β-lactams | Streptococcus pneumoniae | U20083 | |
| | | | U20081 | |
| | | | M25522 | |
| | | | U20075 | |
| | | | U20070 | |
| | | | U20077 | |
| | | | U20068 | |
| | | | Z22184 | |
| | | | U20069 | |
| | | | U20078 | |
| | | | M25521 | |
| | | | M25525 | |
| | | | M25519 | |
| | | | Z21981 | |
| | | | M25523 | |
| | | | M25526 | |
| | | | U20076 | |
| | | | U20074 | |
| | | | M25520 | |
| | | | M25517 | |
| | | | M25524 | |
| | | | Z22230 | |
| | | | U20073 | |
| | | | U20080 | |
| pbp2x¹³ | β-lactams | Streptococcus pneumoniae | X16367 | 1034-1048 |
| | | | X65135 | |
| | | | AB011204 | |
| | | | AB011209 | |
| | | | AB011199 | |
| | | | AB011200 | |
| | | | AB011201 | |
| | | | AB011202 | |
| | | | AB011198 | |
| | | | AB011208 | |
| | | | AB011205 | |
| | | | AB015852 | |
| | | | AB011210 | |
| | | | AB015849 | |
| | | | AB015850 | |
| | | | AB015851 | |
| | | | AB015847 | |
| | | | AB015846 | |
| | | | AB011207 | |
| | | | AB015848 | |
| | | | Z49096 | |
| int | β-lactams, | Enterobacteriaceae, | | 99-102³ |
| | trimethoprim | | | |
| sul | aminoglycosides, | Pseudomonads | | 103-106³ |
| | antiseptic, | | | |
| | chloramphenicol | | | |
| ermA¹⁴ | Macrolides, | Staphylococcus sp. | | 113⁴ |
| | lincosamides, | | | |
| | streptogramin B | | | |
| ermB¹⁴ | Macrolides, | Enterobacteriaceae, | | 114⁴ |
| | lincosamides, | Staphylococcus sp. | | |
| | streptogramin B | Enterococcus sp. | | |
| | | Streptococcus sp. | | |
| ermC¹⁴ | Macrolides, | Enterobacteriaceae, | | 115⁴ |
| | lincosamides, | Staphylococcus sp. | | |
| | streptogramin B | | | |
| ereA¹² | Macrolides | Enterobacteriaceae, | M11277 | |
| | | Staphylococcus sp. | E01199 | |
| | | | AF099140 | |
| ereB¹² | Macrolides | Enterobacteriaceae | A15097 | |
| | | Staphylococcus sp. | X03988 | |
| msrA¹² | Macrolides | Staphylococcus sp. | | 77-80³ |
| mefA, mefE⁸ | Macrolides | Streptococcus sp. | U70055 | |
| | | | U83667 | |
| mphA⁸ | Macrolides | Enterobacteriaceae, | D16251 | |
| | | Staphylococcus sp. | U34344 | |
| | | | U36578 | |
| linA/linA′⁹ | Lincosamides | Staphylococcus sp. | J03947 | |
| | | | M14039 | |
| | | | A15070 | |
| | | | E01245 | |
| linB¹⁰ | Lincosamides | Enterococcus faecium | AF110130 | |
| | | | AJ238249 | |
| vga¹⁵ | Streptrogramin | Staphylococcus sp. | M90056 | 89-90³ |
| | | | U82085 | |
| vgb¹⁵ | Streptrogramin | Staphylococcus sp. | M36022 | |
| | | | M20219 | |
| | | | AF015628 | |
| vat¹⁵ | Streptrogramin | Staphylococcus sp. | L07778 | 87-88³ |
| vatB¹⁵ | Streptrogramin | Staphylococcus sp. | U19459 | |
| | | | L38809 | |
| satA¹⁵ | Streptrogramin | Enterococcus faecium | L12033 | 81-82³ |
| mupA¹² | Mupirocin | Staphylococcus aureus | X75439 | |
| | | | X59478 | |
| | | | X59477 | |
| gyrA¹⁶ | Quinolones | Gram-positive and | X95718 | 1255, 1607-1608, |
| | | gram-negative bacteria | X06744 | 1764-1776, |
| | | | X57174 | 2013-2014, |
| | | | X16817 | 2277-2280 |
| | | | X71437 | |
| | | | AF065152 | |
| | | | AF060881 | |
| | | | D32252 | |
| parC/grlA¹⁶ | Quinolones | Gram-positive and | AB005036 | 1777-1785 |
| | | gram-negative bacteria | AF056287 | |
| | | | X95717 | |
| | | | AF129764 | |
| | | | AB017811 | |
| | | | AF065152 | |
| parE/grlB¹⁶ | Quinolones | Gram-positive bacteria | X95717 | |
| | | | AF065153 | |
| | | | AF058920 | |
| norA¹⁶ | Quinolones | Staphylococcus sp. | D90119 | |
| | | | M80252 | |
| | | | M97169 | |
| mexR (nalB)¹⁶ | Quinolones | Pseudomonas aeruginosa | U23763 | |
| nfxB¹⁶ | Quinolones | Pseudomonas aeruginosa | X65646 | |
| cat¹² | Chloramphenicol | Gram-positive and | M55620 | |
| | | gram-negative bacteria | X15100 | |
| | | | A24651 | |
| | | | M28717 | |
| | | | A00568 | |
| | | | A00569 | |
| | | | X74948 | |
| | | | Y00723 | |
| | | | A24362 | |
| | | | A00569 | |
| | | | M93113 | |
| | | | M62822 | |
| | | | M58516 | |
| | | | V01277 | |
| | | | X02166 | |
| | | | M77169 | |
| | | | X53796 | |
| | | | J01841 | |
| | | | X07848 | |
| ppflo-like | Chloramphenicol | | AF071555 | |
| embB¹⁷ | Ethambutol | Mycobacterium tuberculosis | U68480 | |
| pncA¹⁷ | Pyrazinamide | Mycobacterium tuberculosis | U59967 | |
| rpoB¹⁷ | Rifampin | Mycobacterium tuberculosis | AF055891 | |
| | | | AF055892 | |
| | | | S71246 | |
| | | | L27989 | |
| | | | AF055893 | |
| inhA¹⁷ | Isoniazid | Mycobacterium tuberculosis | AF106077 | |
| | | | U02492 | |
| vanA¹² | Vancomycin | Enterococcus sp. | | 67-70³ |
| | | | | 1049-1057 |
| vanB¹² | Vancomycin | Enterococcus sp. | | 116⁴ |
| vanC1¹² | Vancomycin | Enterococcus gallinarum | | 117⁴ |
| | | | | 1058-1059 |
| vanC2¹² | Vancomycin | Enterococcus casseliflavus | U94521 | 1060-1063 |
| | | | U94522 | |
| | | | U94523 | |
| | | | U94524 | |
| | | | U94525 | |
| | | | L29638 | |
| vanC3¹² | Vancomycin | Enterococcus flavescens | L29639 | 1064-1066 |
| | | | U72706 | |
| vanD¹⁸ | Vancomycin | Enterococcus faecium | AF130997 | |
| vanE¹² | Vancomycin | Enterococcus faecium | AF136925 | |
| tetB¹⁹ | Tetracycline | Gram-negative bacteria | J01830 | |
| | | | AF162223 | |
| | | | AP000342 | |
| | | | S83213 | |
| | | | U81141 | |
| | | | V00611 | |
| tetM¹⁹ | Tetracycline | Gram-negative and | X52632 | |
| | | Gram-positive bacteria | AF116348 | |
| | | | U50983 | |
| | | | X92947 | |
| | | | M211136 | |
| | | | U08812 | |
| | | | X04388 | |
| sul II²⁰ | Sulfonamides | Gram-negative bacteria | M36657 | |
| | | | AF017389 | |
| | | | AF017391 | |
| dhfrIa²⁰ | Trimethoprim | Gram-negative bacteria | AJ238350 | |
| | | | X17477 | |
| | | | K00052 | |
| | | | U09476 | |
| | | | X00926 | |
| dhfrIb²⁰ | Trimethoprim | Gram-negative bacteria | Z50805 | |
| | | | Z50804 | |
| dhfrV²⁰ | Trimethoprim | Gram-negative bacteria | X12868 | |
| dhfrVI²⁰ | Trimethoprim | Gram-negative bacteria | Z86002 | |
| dhfrVII²⁰ | Trimethoprim | Gram-negative bacteria | U31119 | |
| | | | AF139109 | |
| | | | X58425 | |
| dhfrVIII²⁰ | Trimethoprim | Gram-negative bacteria | U10186 | |
| | | | U09273 | |
| dhfrIX²⁰ | Trimethoprim | Gram-negative bacteria | X57730 | |
| dhfrXII²⁰ | Trimethoprim | Gram-negative bacteria | Z21672 | |
| | | | AF175203 | |
| | | | AF180731 | |
| | | | M84522 | |
| dhfrXIII²⁰ | Trimethoprim | Gram-negative bacteria | Z50802 | |
| dhfrXV²⁰ | Trimethoprim | Gram-negative bacteria | Z83331 | |
| dhfrXVII²⁰ | Trimethoprim | Gram-negative bacteria | AF170088 | |
| | | | AF180469 | |
| | | | AF169041 | |
| dfrA²⁰ | Trimethoprim | Staphylococcus sp. | AF045472 | |
| | | | U40259 | |
| | | | AF051916 | |
| | | | X13290 | |
| | | | Y07536 | |
| | | | Z16422 | |
| | | | Z48233 | |

¹Bacteria having high incidence for the specified antibiotic resistance gene. The presence of the antibiotic resistance genes in other bacteria is not excluded.
²Shaw, K. J., P. N. Rather, R. S. Hare, and G. H. Miller. 1993. Molecular genetics of aminoglycoside resistance genes and familial relationships of the aminoglycoside-modifying enzymes. Microbial. Rev. 57: 138-163.
³Antibiotic resistance genes from our assigned U.S. Pat. No. 6,001,564 for which we have selected PCR primer pairs.
⁴These SEQ ID NOs. refer to a previous patent (publication WO98/20157).
⁵Bush, K., G. A. Jacoby and A. Medeiros. 1995. A functional classification scheme for β-lactamase and its correlation with molecular structure. Antimicrob. Agents. Chemother. 39: 1211-1233.
⁶Nucleotide mutations in bla_{SHV}, bla_{TEM}, and bla_{OXA}, are associated with extended-spectrum β-lactamase or inhibitor-resistant β-lactamase.
⁷Bauerfeind, A., Y. Chong, and K. Lee. 1998. Plasmid-encoded AmpC beta-lactamases: how far have we gone 10 ears after discovery? Yonsei Med. J. 39: 520-525.
⁸Sutcliffe. J., T. Grebe, A. Tait-Kamradt, and L. Wondrack. 1996. Detection of erythromycin-resistant determinants by PCR. Antimicrob. Agent Chemother. 40: 2562-2566.
⁹Leclerc, R., A., Brisson-Noël, J. Duval, and P. Courvalin. 1991. Phenotypic expression and genetic heterogeneity of lincosamide inactivation in Staphylococcus sp. Antimicrob. Agents. Chemother. 31: 1887-1891.
¹⁰Bozdogan, B., L. Berrezouga, M.-S. Kuo, D. A. Yurek, K. A. Farley, B. J. Stockman, and R. Leclercq. 1999. A new gene, linB, conferring resistance to lincosamides by nucleotidylation in Enterococcus faecium HM1025. Antimicrob. Agents. Chemother. 43: 925-929.
¹¹Cockerill III, F. R. 1999. Genetic methods for assessing antimicrobial resistance. Antimicrob. Agents. Chemother. 43: 199-212.
¹²Tenover, F. C., T. Popovic, and O Olsvik. 1996. Genetic methods for detecting antibacterial resistance genes. pp. 1368-1378. In Murray, P. R., E. J. Baron, M. A. Pfaller, F. C. Tenover, R. H. Yolken (eds). Manual of clinical microbiology. 6th ed., ASM Press, Washington, D. C. USA
¹³Dowson, C. G., T. J. Tracey, and B. G. Spratt. 1994. Origin and molecular epidemiology of penicillin-binding-protein-mediated resistance to β-lactam antibiotics. Trends Molec. Microbiol.2: 361-366.
¹⁴Jensen, L. B., N. Frimodt-Moller, F. M. Aarestrup. 1999. Presence of erm gene classes in Gram-positive bacteria of animal and human origin in Denmark. FEMS Microbiol. 170: 151-158:
¹⁵Thal, L. A., and M. J. Zervos. 1999. Occurrence and epidemiology of resistance to virginimycin and streptrogramins. J. Antimicrob. Chemother. 43: 171-176.
¹⁶Martinez J. L., A. Alonso, J. M. Gomez-Gomez, and F. Baquero. 1998. Quinolone resistance by mutations in chromosomal gyrase genes. Just the tip of the iceberg? J. Antimicrob. Chemother. 42: 683-688
¹⁷Cockerill III, F. R. 1999. Genetic methods for assessing antimicrobial resistance. Antimicrob. Agents. Chemother. 43: 199-212.
¹⁸Casadewall, B. and P. Courvalin. 1999 Characterization of the vanD glycopeptide resistance gene cluster from Enterococcus faecium BM 4339. J. Bacteriol. 181: 3644-3648.
¹⁹Roberts, M. C. 1999. Genetic mobility and distribution of tetracycline resistance determinants. Ciba Found. Symp. 207: 206-222.
²⁰Huovinen, P., L. Sundstrom, G. Swedberg, and O. Skold. 1995. Trimethoprim and sulfonamide resistance. Antimicrob. Agent Chemother. 39: 279-289.

TABLE 6
List of bacterial toxins selected for diagnostic purposes.

| Organism | Toxin | Accession number |
|---|---|---|
| Actinobacillus actinomycetemcomitans | Cytolethal distending toxin (cdtA, cdtB, cdtC) | AF006830 |
| | Leukotoxin (ltxA) | M27399 |
| Actinomyces pyogenes | Hemolysin (pyolysin) | U84782 |
| Aeromonas hydrophila | Aerolysin (aerA) | M16495 |
| | Haemolysin (hlyA) | U81555 |
| | Cytotonic enterotoxin (alt) | L77573 |
| Bacillus anthracis | Anthrax toxin (cya) | M23179 |
| Bacillus cereus | Enterotoxin (bceT) | D17312 |
| | | AF192766, AF192767 |
| | Enterotoxic hemolysin BL | AJ237785 |
| | Non-haemolytic enterotoxins A, B and C (nhe) | Y19005 |
| Bacillus mycoides | Hemolytic enterotoxin HBL | AJ243150 to AJ243153 |
| Bacillus pseudomycoides | Hemolytic enterotoxin HBL | AJ243154 to AJ243156 |
| Bacteroides fragilis | Enterotoxin (bftP) | U67735 |
| | Matrix metalloprotease/enterotoxin (fragilysin) | S75941, AF038459 |
| | Metalloprotease toxin-2 | U90931 |
| | | AF081785 |
| | Metalloprotease toxin-3 | AF056297 |
| Bordetella bronchiseptica | Adenylate cyclase hemolysin (cyaA) | Z37112, U22953 |
| | Dermonecrotic toxin (dnt) | U59687 |
| | | AB020025 |
| Bordetella pertussis | Pertussis toxin (S1 subunit, tox) | AJ006151 |
| | | AJ006153 |
| | | AJ006155 |
| | | AJ006157 |
| | | AJ006159 |
| | | AJ007363 |
| | | M14378, M16494 |
| | | AJ007364 |
| | | M13223 |
| | | X16347 |
| | Adenyl cyclase (cya) | 18323 |
| | Dermonecrotic toxin (dnt) | U10527 |
| Campylobacter jejuni | Cytolethal distending toxin (cdtA, cdtB, cdtC) | U51121 |
| Citrobacter freundii | Shiga-like toxin (slt-llcA) | X67514, S53206 |
| Clostridium botulinum | Botulism toxin (BoNT) (A, B, E and F serotypes | X52066, X52088 |
| | are neurotoxic for humans; the other serotypes | X73423 |
| | have not been considered) | M30196 |
| | | X70814 |
| | | X70819 |
| | | X71343 |
| | | Z11934 |
| | | X70817 |
| | | M81186 |
| | | X70818 |
| | | X70815 |
| | | X62089 |
| | | X62683 |
| | | S76749 |
| | | X81714 |
| | | X70816 |
| | | X70820 |
| | | X70281 |
| | | L35496 |
| | | M92906 |
| Clostridium difficile | A toxin (enterotoxin) (tcdA) (cdtA) | AB012304 |
| | | AF053400 |
| | | Y12616 |
| | | X51797 |
| | | X17194 |
| | | M30307 |
| | B toxin (cytotoxin) (toxB) (cdtB) | Z23277 |
| | | X53138 |
| Clostridium perfringens | Alpha (phospholipase C) (cpa) | L43545 |
| | | L43546 |
| | | L43547 |
| | | L43548 |
| | | X13608 |
| | | X17300 |
| | | D10248 |
| | Beta (dermonecrotic protein) (cpb) | L13198 |
| | | X83275 |
| | | L77965 |
| | Enterotoxin (cpe) | AJ000766 |
| | | M98037 |
| | | X81849 |
| | | X71844 |
| | | Y16009 |
| | Enterotoxin pseudogene (not expressed) | AF037328 |
| | | AF037329 |
| | | AF037330 |
| | Epsilon toxin (etxD) | M80837 |
| | | M95206 |
| | | X60694 |
| | Iota (Ia and Ib) | X73562 |
| | Lambda (metalloprotease) | D45904 |
| | Theta (perfringolysin O) | M36704 |
| Clostridium sordellii | Cytotoxin L | X82638 |
| Clostridium tetani | Tetanos toxin | X06214 |
| | | X04436 |
| Corynebacterium diphtheriae | Diphtheriae toxin | X00703 |
| Corynebacterium pseudotuberculosis | Phospholipase C | A21336 |
| Eikenella corrodens | lysine decarboxylase (cadA) | U89166 |
| Enterobacter cloacae | Shiga-like toxin II | Z50754, U33502 |
| Enterococcus faecalis | Cytolysin B (cylB) | M38052 |
| Escherichia coli (EHEC) | Hemolysin toxin (hlyA and ehxA) | AF043471 |
| | | X94129 |
| | | X79839 |
| | | X86087 |
| | | AB011549 |
| | | AF074613 |

TABLE 7
Origin of the nucleic acids and/or sequences in the sequence listing.

| SEQ ID NO. | Archaeal, bacterial, fungal or parasitical species | Source | Gene* |
|---|---|---|---|
| 1 | Acinetobacter baumannii | This patent | tuf |
| 2 | Actinomyces meyeri | This patent | tuf |
| 3 | Aerococcus viridans | This patent | tuf |
| 4 | Achromobacter xylosoxidans subsp. denitrificans | This patent | tuf |
| 5 | Anaerorhabdus furcosus | This patent | tuf |
| 6 | Bacillus anthracis | This patent | tuf |
| 7 | Bacillus cereus | This patent | tuf |
| 8 | Bacteroides distasonis | This patent | tuf |
| 9 | Enterococcus casseliflavus | This patent | tuf |
| 10 | Staphylococcus saprophyticus | This patent | tuf |
| 11 | Bacteroides ovatus | This patent | tuf |
| 12 | Bartonella henselae | This patent | tuf |
| 13 | Bifidobacterium adolescentis | This patent | tuf |
| 14 | Bifidobacterium dentium | This patent | tuf |
| 15 | Brucella abortus | This patent | tuf |
| 16 | Burkholderia cepacia | This patent | tuf |
| 17 | Cedecea davisae | This patent | tuf |
| 18 | Cedecea neteri | This patent | tuf |
| 19 | Cedecea lapagei | This patent | tuf |
| 20 | Chlamydia pneumoniae | This patent | tuf |
| 21 | Chlamydia psittaci | This patent | tuf |
| 22 | Chlamydia trachomatis | This patent | tuf |
| 23 | Chryseobacterium meningosepticum | This patent | tuf |
| 24 | Citrobacter amalonaticus | This patent | tuf |
| 25 | Citrobacter braakii | This patent | tuf |
| 26 | Citrobacter koseri | This patent | tuf |
| 27 | Citrobacter farmeri | This patent | tuf |
| 28 | Citrobacter freundii | This patent | tuf |
| 29 | Citrobacter sedlakii | This patent | tuf |
| 30 | Citrobacter werkmanii | This patent | tuf |
| 31 | Citrobacter youngae | This patent | tuf |
| 32 | Clostridium perfringens | This patent | tuf |
| 33 | Comamonas acidovorans | This patent | tuf |
| 34 | Corynebacterium bovis | This patent | tuf |
| 35 | Corynebacterium cervicis | This patent | tuf |
| 36 | Corynebacterium flavescens | This patent | tuf |
| 37 | Corynebacterium kutscheri | This patent | tuf |
| 38 | Corynebacterium minutissimum | This patent | tuf |
| 39 | Corynebacterium mycetoides | This patent | tuf |
| 40 | Corynebacterium pseudogenitalium | This patent | tuf |
| 41 | Corynebacterium renale | This patent | tuf |
| 42 | Corynebacterium ulcerans | This patent | tuf |
| 43 | Corynebacterium urealyticum | This patent | tuf |
| 44 | Corynebacterium xerosis | This patent | tuf |
| 45 | Coxiella burnetii | This patent | tuf |
| 46 | Edwardsiella hoshinae | This patent | tuf |
| 47 | Edwardsiella tarda | This patent | tuf |
| 48 | Eikenella corrodens | This patent | tuf |
| 49 | Enterobacter aerogenes | This patent | tuf |
| 50 | Enterobacter agglomerans | This patent | tuf |
| 51 | Enterobacter amnigenus | This patent | tuf |
| 52 | Enterobacter asburiae | This patent | tuf |
| 53 | Enterobacter cancerogenus | This patent | tuf |
| 54 | Enterobacter cloacae | This patent | tuf |
| 55 | Enterobacter gergoviae | This patent | tuf |
| 56 | Enterobacter hormaechei | This patent | tuf |
| 57 | Enterobacter sakazakii | This patent | tuf |
| 58 | Enterococcus casseliflavus | This patent | tuf |
| 59 | Enterococcus cecorum | This patent | tuf |
| 60 | Enterococcus dispar | This patent | tuf |
| 61 | Enterococcus durans | This patent | tuf |
| 62 | Enterococcus faecalis | This patent | tuf |
| 63 | Enterococcus faecalis | This patent | tuf |
| 64 | Enterococcus faecium | This patent | tuf |
| 65 | Enterococcus flavescens | This patent | tuf |
| 66 | Enterococcus gallinarum | This patent | tuf |
| 67 | Enterococcus hirae | This patent | tuf |
| 68 | Enterococcus mundtii | This patent | tuf |
| 69 | Enterococcus pseudoavium | This patent | tuf |
| 70 | Enterococcus raffinosus | This patent | tuf |
| 71 | Enterococcus saccharolyticus | This patent | tuf |
| 72 | Enterococcus solitarius | This patent | tuf |
| 73 | Enterococcus casseliflavus | This patent | tuf (C) |
| 74 | Staphylococcus saprophyticus | This patent | unknown |
| 75 | Enterococcus flavescens | This patent | tuf (C) |
| 76 | Enterococcus gallinarum | This patent | tuf (C) |
| 77 | Ehrlichia canis | This patent | tuf |
| 78 | Escherichia coli | This patent | tuf |
| 79 | Escherichia fergusonii | This patent | tuf |
| 80 | Escherichia hermannii | This patent | tuf |
| 81 | Escherichia vulneris | This patent | tuf |
| 82 | Eubacterium lentum | This patent | tuf |
| 83 | Eubacterium nodatum | This patent | tuf |
| 84 | Ewingella americana | This patent | tuf |
| 85 | Francisella tularensis | This patent | tuf |
| 86 | Fusobacterium nucleatum subsp. polymorphum | This patent | tuf |
| 87 | Gemella haemolysans | This patent | tuf |
| 88 | Gemella morbillorum | This patent | tuf |
| 89 | Haemophilus actinomycetemcomitans | This patent | tuf |
| 90 | Haemophilus aphrophilus | This patent | tuf |
| 91 | Haemophilus ducreyi | This patent | tuf |
| 92 | Haemophilus haemolyticus | This patent | tuf |
| 93 | Haemophilus parahaemolyticus | This patent | tuf |
| 94 | Haemophilus parainfluenzae | This patent | tuf |
| 95 | Haemophilus paraphrophilus | This patent | tuf |
| 96 | Haemophilus segnis | This patent | tuf |
| 97 | Hafnia alvei | This patent | tuf |
| 98 | Kingella kingae | This patent | tuf |
| 99 | Klebsiella omithinolytica | This patent | tuf |
| 100 | Klebsiella oxytoca | This patent | tuf |
| 101 | Klebsiella planticola | This patent | tuf |
| 102 | Klebsiella pneumoniae subsp. ozaenae | This patent | tuf |
| 103 | Klebsiella pneumoniae pneumoniae | This patent | tuf |
| 104 | Klebsiella pneumoniae subsp. rhinoscleromatis | This patent | tuf |
| 105 | Kluyvera ascorbata | This patent | tuf |
| 106 | Kluyvera cryocrescens | This patent | tuf |
| 107 | Kluyvera georgiana | This patent | tuf |
| 108 | Lactobacillus casei subsp. casei | This patent | tuf |
| 109 | Lactococcus lactis subsp. lactis | This patent | tuf |
| 110 | Leclercia adecarboxylata | This patent | tuf |
| 111 | Legionella micdadei | This patent | tuf |
| 112 | Legionella pneumophila subsp. pneumophila | This patent | tuf |
| 113 | Leminorella grimontii | This patent | tuf |
| 114 | Leminorella richardii | This patent | tuf |
| 115 | Leptospira interrogans | This patent | tuf |
| 116 | Megamonas hypermegale | This patent | tuf |
| 117 | Mitsuokella multacidus | This patent | tuf |
| 118 | Mobiluncus curtisii subsp. holmesii | This patent | tuf |
| 119 | Moellerella wisconsensis | This patent | tuf |
| 120 | Moraxella catarrhalis | This patent | tuf |
| 121 | Morganella morganii subsp. morganii | This patent | tuf |
| 122 | Mycobacterium tuberculosis | This patent | tuf |
| 123 | Neisseria cinerea | This patent | tuf |
| 124 | Neisseria elongata subsp. elongata | This patent | tuf |
| 125 | Neisseria flavescens | This patent | tuf |
| 126 | Neisseria gonorrhoeae | This patent | tuf |
| 127 | Neisseria lactamica | This patent | tuf |
| 128 | Neisseria meningitidis | This patent | tuf |
| 129 | Neisseria mucosa | This patent | tuf |
| 130 | Neisseria sicca | This patent | tuf |
| 131 | Neisseria subflava | This patent | tuf |
| 132 | Neisseria weaveri | This patent | tuf |
| 133 | Ochrobactrum anthropi | This patent | tuf |
| 134 | Pantoea agglomerans | This patent | tuf |
| 135 | Pantoea dispersa | This patent | tuf |
| 136 | Pasteurella multocida | This patent | tuf |
| 137 | Peptostreptococcus anaerobius | This patent | tuf |
| 138 | Peptostreptococcus asaccharolyticus | This patent | tuf |
| 139 | Peptostreptococcus prevotii | This patent | tuf |
| 140 | Porphyromonas asaccharolytica | This patent | tuf |
| 141 | Porphyromonas gingivalis | This patent | tuf |
| 142 | Pragia fontium | This patent | tuf |
| 143 | Prevotella melaninogenica | This patent | tuf |
| 144 | Prevotella oralis | This patent | tuf |
| 145 | Propionibacterium acnes | This patent | tuf |
| 146 | Proteus mirabilis | This patent | tuf |
| 147 | Proteus penneri | This patent | tuf |
| 148 | Proteus vulgaris | This patent | tuf |
| 149 | Providencia alcalifaciens | This patent | tuf |
| 150 | Providencia rettgeri | This patent | tuf |
| 151 | Providencia rustigianii | This patent | tuf |
| 152 | Providencia stuartii | This patent | tuf |
| 153 | Pseudomonas aeruginosa | This patent | tuf |
| 154 | Pseudomonas fluorescens | This patent | tuf |
| 155 | Pseudomonas stutzeri | This patent | tuf |
| 156 | Psychrobacter phenylpyruvicum | This patent | tuf |
| 157 | Rahnella aquatilis | This patent | tuf |
| 158 | Salmonella choleraesuis subsp. arizonae | This patent | tuf |
| 159 | Salmonella choleraesuis subsp. choleraesuis | This patent | tuf |
| | serotype Choleraesuis | | |
| 160 | Salmonella choleraesuis subsp. diarizonae | This patent | tuf |
| 161 | Salmonella choleraesuis subsp. choleraesuis | This patent | tuf |
| | serotype Heidelberg | | |
| 162 | Salmonella choleraesuis subsp. houtenae | This patent | tuf |
| 163 | Salmonella choleraesuis subsp. indica | This patent | tuf |
| 164 | Salmonella choleraesuis subsp. salamae | This patent | tuf |
| 165 | Salmonella choleraesuis subsp. choleraesuis serotype Typhi | This patent | tuf |
| 166 | Serratia fonticola | This patent | tuf |
| 167 | Serratia liquefaciens | This patent | tuf |
| 168 | Serratia marcescens | This patent | tuf |
| 169 | Serratia odorifera | This patent | tuf |
| 170 | Serratia plymuthica | This patent | tuf |
| 171 | Serratia rubidaea | This patent | tuf |
| 172 | Shigella boydii | This patent | tuf |
| 173 | Shigella dysenteriae | This patent | tuf |
| 174 | Shigella flexneri | This patent | tuf |
| 175 | Shigella sonnei | This patent | tuf |
| 176 | Staphylococcus aureus | This patent | tuf |
| 177 | Staphylococcus aureus | This patent | tuf |
| 178 | Staphylococcus aureus | This patent | tuf |
| 179 | Staphylococcus aureus | This patent | tuf |
| 180 | Staphylococcus aureus subsp. aureus | This patent | tuf |
| 181 | Staphylococcus auricularis | This patent | tuf |
| 182 | Staphylococcus capitis subsp. capitis | This patent | tuf |
| 183 | Macrococcus caseolyticus | This patent | tuf |
| 184 | Staphylococcus cohnii subsp. cohnii | This patent | tuf |
| 185 | Staphylococcus epidermidis | This patent | tuf |
| 186 | Staphylococcus haemolyticus | This patent | tuf |
| 187 | Staphylococcus warneri | This patent | tuf |
| 188 | Staphylococcus haemolyticus | This patent | tuf |
| 189 | Staphylococcus haemolyticus | This patent | tuf |
| 190 | Staphylococcus haemolyticus | This patent | tuf |
| 191 | Staphylococcus hominis subsp. hominis | This patent | tuf |
| 192 | Staphylococcus warneri | This patent | tuf |
| 193 | Staphylococcus hominis | This patent | tuf |
| 194 | Staphylococcus hominis | This patent | tuf |
| 195 | Staphylococcus hominis | This patent | tuf |
| 196 | Staphylococcus hominis | This patent | tuf |
| 197 | Staphylococcus lugdunensis | This patent | tuf |
| 198 | Staphylococcus saprophyticus | This patent | tuf |
| 199 | Staphylococcus saprophyticus | This patent | tuf |
| 200 | Staphylococcus saprophyticus | This patent | tuf |
| 201 | Staphylococcus sciuri subsp. sciuri | This patent | tuf |
| 202 | Staphylococcus warneri | This patent | tuf |
| 203 | Staphylococcus warneri | This patent | tuf |
| 204 | Bifidobacterium longum | This patent | tuf |
| 205 | Stenotrophomonas maltophilia | This patent | tuf |
| 206 | Streptococcus acidominimus | This patent | tuf |
| 207 | Streptococcus agalactiae | This patent | tuf |
| 208 | Streptococcus agalactiae | This patent | tuf |
| 209 | Streptococcus agalactiae | This patent | tuf |
| 210 | Streptococcus agalactiae | This patent | tuf |
| 211 | Streptococcus anginosus | This patent | tuf |
| 212 | Streptococcus bovis | This patent | tuf |
| 213 | Streptococcus anginosus | This patent | tuf |
| 214 | Streptococcus cricetus | This patent | tuf |
| 215 | Streptococcus cristatus | This patent | tuf |
| 216 | Streptococcus downei | This patent | tuf |
| 217 | Streptococcus dysgalactiae | This patent | tuf |
| 218 | Streptococcus equi subsp. equi | This patent | tuf |
| 219 | Streptococcus ferus | This patent | tuf |
| 220 | Streptococcus gordonii | This patent | tuf |
| 221 | Streptococcus anginosus | This patent | tuf |
| 222 | Streptococcus macacae | This patent | tuf |
| 223 | Streptococcus gordonii | This patent | tuf |
| 224 | Streptococcus mutans | This patent | tuf |
| 225 | Streptococcus parasanguinis | This patent | tuf |
| 226 | Streptococcus ratti | This patent | tuf |
| 227 | Streptococcus sanguinis | This patent | tuf |
| 228 | Streptococcus sobrinus | This patent | tuf |
| 229 | Streptococcus suis | This patent | tuf |
| 230 | Streptococcus uberis | This patent | tuf |
| 231 | Streptococcus vestibularis | This patent | tuf |
| 232 | Tatumella ptyseos | This patent | tuf |
| 233 | Trabulsiella guamensis | This patent | tuf |
| 234 | Veillonella parvula | This patent | tuf |
| 235 | Yersinia enterocolitica | This patent | tuf |
| 236 | Yersinia frederiksenii | This patent | tuf |
| 237 | Yersinia intermedia | This patent | tuf |
| 238 | Yersinia pestis | This patent | tuf |
| 239 | Yersinia pseudotuberculosis | This patent | tuf |
| 240 | Yersinia rohdei | This patent | tuf |
| 241 | Yokenella regensburgei | This patent | tuf |
| 242 | Achromobacter xylosoxidans subsp. denitrificans | This patent | atpD |
| 243 | Acinetobacter baumannii | This patent | atpD |
| 244 | Acinetobacter lwoffii | This patent | atpD |
| 245 | Staphylococcus saprophyticus | This patent | atpD |
| 246 | Alcaligenes faecalis subsp. faecalis | This patent | atpD |
| 247 | Bacillus anthracis | This patent | atpD |
| 248 | Bacillus cereus | This patent | atpD |
| 249 | Bacteroides distasonis | This patent | atpD |
| 250 | Bacteroides ovatus | This patent | atpD |
| 251 | Leclercia adecarboxylata | This patent | atpD |
| 252 | Stenotrophomonas maltophilia | This patent | atpD |
| 253 | Bartonella henselae | This patent | atpD |
| 254 | Bifidobacterium adolescentis | This patent | atpD |
| 255 | Brucella abortus | This patent | atpD |
| 256 | Cedecea davisae | This patent | atpD |
| 257 | Cedecea lapagei | This patent | atpD |
| 258 | Cedecea neteri | This patent | atpD |
| 259 | Chryseobacterium meningosepticum | This patent | atpD |
| 260 | Citrobacter amalonaticus | This patent | atpD |
| 261 | Citrobacter braakii | This patent | atpD |
| 262 | Citrobacter koseri | This patent | atpD |
| 263 | Citrobacter farmeri | This patent | atpD |
| 264 | Citrobacter freundii | This patent | atpD |
| 265 | Citrobacter koseri | This patent | atpD |
| 266 | Citrobacter sedlakii | This patent | atpD |
| 267 | Citrobacter werkmanii | This patent | atpD |
| 268 | Citrobacter youngae | This patent | atpD |
| 269 | Clostridium innocuum | This patent | atpD |
| 270 | Clostridium perfringens | This patent | atpD |
| 272 | Corynebacterium diphtheriae | This patent | atpD |
| 273 | Corynebacterium pseudodiphtheriticum | This patent | atpD |
| 274 | Corynebacterium ulcerans | This patent | atpD |
| 275 | Corynebacterium urealyticum | This patent | atpD |
| 276 | Coxiella burnetii | This patent | atpD |
| 277 | Edwardsiella hoshinae | This patent | atpD |
| 278 | Edwardsiella tarda | This patent | atpD |
| 279 | Eikenella corrodens | This patent | atpD |
| 280 | Enterobacter agglomerans | This patent | atpD |
| 281 | Enterobacter arnnigenus | This patent | atpD |
| 282 | Enterobacter asburiae | This patent | atpD |
| 283 | Enterobacter cancerogenus | This patent | atpD |
| 284 | Enterobacter cloacae | This patent | atpD |
| 285 | Enterobacter gergoviae | This patent | atpD |
| 286 | Enterobacter hormaechei | This patent | atpD |
| 287 | Enterobacter sakazakii | This patent | atpD |
| 288 | Enterococcus avium | This patent | atpD |
| 289 | Enterococcus casseliflavus | This patent | atpD |
| 290 | Enterococcus durans | This patent | atpD |
| 291 | Enterococcus faecalis | This patent | atpD |
| 292 | Enterococcus faecium | This patent | atpD |
| 293 | Enterococcus gallinarum | This patent | atpD |
| 294 | Enterococcus saccharolyticus | This patent | atpD |
| 295 | Escherichia fergusonii | This patent | atpD |
| 296 | Escherichia hermannii | This patent | atpD |
| 297 | Escherichia vulneris | This patent | atpD |
| 298 | Eubacterium lentum | This patent | atpD |
| 299 | Ewingella americana | This patent | atpD |
| 300 | Francisella tularensis | This patent | atpD |
| 301 | Fusobacterium gonidiaformans | This patent | atpD |
| 302 | Fusobacterium necrophorum subsp. necrophorum | This patent | atpD |
| 303 | Fusobacterium nucleatum subsp. polymorphum | This patent | atpD |
| 304 | Gardnerella vaginalis | This patent | atpD |
| 305 | Gemella haemolysans | This patent | atpD |
| 306 | Gemella morbillorum | This patent | atpD |
| 307 | Haemophilus ducreyi | This patent | atpD |
| 308 | Haemophilus haemolyticus | This patent | atpD |
| 309 | Haemophilus parahaemolyticus | This patent | atpD |
| 310 | Haemophilus parainfluenzae | This patent | atpD |
| 311 | Hafnia alvei | This patent | atpD |
| 312 | Kingella kingae | This patent | atpD |
| 313 | Klebsiella pneumoniae subsp. ozaenae | This patent | atpD |
| 314 | Klebsiella omithinolytica | This patent | atpD |
| 315 | Klebsiella oxytoca | This patent | atpD |
| 316 | Klebsiella planticola | This patent | atpD |
| 317 | Kiebsiella pneumoniae subsp. pneumoniae | This patent | atpD |
| 318 | Kluyvera ascorbata | This patent | atpD |
| 319 | Kluyvera cryocrescens | This patent | atpD |
| 320 | Kluyvera georgiana | This patent | atpD |
| 321 | Lactobacillus acidophilus | This patent | atpD |
| 322 | Legionella pneumophila subsp. pneumophila | This patent | atpD |
| 323 | Leminorella grimontii | This patent | atpD |
| 324 | Listeria monocytogenes | This patent | atpD |
| 325 | Micrococcus lylae | This patent | atpD |
| 326 | Moellerella wisconsensis | This patent | atpD |
| 327 | Moraxella catarrhalis | This patent | atpD |
| 328 | Moraxella osloensis | This patent | atpD |
| 329 | Morganella morganii subsp. morganii | This patent | atpD |
| 330 | Pantoea agglomerans | This patent | atpD |
| 331 | Pantoea dispersa | This patent | atpD |
| 332 | Pasteurella multocida | This patent | atpD |
| 333 | Pragia fontium | This patent | atpD |
| 334 | Proteus mirabilis | This patent | atpD |
| 335 | Proteus vulgaris | This patent | atpD |
| 336 | Providencia alcalifaciens | This patent | atpD |
| 337 | Providencia rettgeri | This patent | atpD |
| 338 | Providencia rustigianii | This patent | atpD |
| 339 | Providencia stuartii | This patent | atpD |
| 340 | Psychrobacter phenylpyruvicum | This patent | atpD |
| 341 | Rahnella aquatilis | This patent | atpD |
| 342 | Salmonella choleraesuis subsp. arizonae | This patent | atpD |
| 343 | Salmonella choleraesuis subsp. choleraesuis | This patent | atpD |
| | serotype Choleraesuis | | |
| 344 | Salmonella choleraesuis subsp. diarizonae | This patent | atpD |
| 345 | Salmonella choleraesuis subsp. houtenae | This patent | atpD |
| 346 | Salmonella choleraesuis subsp. indica | This patent | atpD |
| 347 | Salmonella choleraesuis subsp. choleraesuis | This patent | atpD |
| | serotype Paratyphi A | | |
| 348 | Salmonella choleraesuis subsp. choleraesuis | This patent | atpD |
| | serotype Paratyphi B | | |
| 349 | Salmonella choleraesuis subsp. salamae | This patent | atpD |
| 350 | Salmonella choleraesuis subsp. choleraesuis | This patent | atpD |
| | serotype Typhi | | |
| 351 | Salmonella choleraesuis subsp. choleraesuis | This patent | atpD |
| | serotype Typhimurium | | |
| 352 | Salmonella choleraesuis subsp. choleraesuis | This patent | atpD |
| | serotype Virchow | | |
| 353 | Serratia ficaria | This patent | atpD |
| 354 | Serratia fonticola | This patent | atpD |
| 355 | Serratia grimesii | This patent | atpD |
| 356 | Serratia liquefaciens | This patent | atpD |
| 357 | Serratia marcescens | This patent | atpD |
| 358 | Serratia odorifera | This patent | atpD |
| 359 | Serratia plymuthica | This patent | atpD |
| 360 | Serratia rubidaea | This patent | atpD |
| 361 | Pseudomonas putida | This patent | atpD |
| 362 | Shigella boydii | This patent | atpD |
| 363 | Shigella dysenteriae | This patent | atpD |
| 364 | Shigella flexneri | This patent | atpD |
| 365 | Shigella sonnei | This patent | atpD |
| 366 | Staphylococcus aureus | This patent | atpD |
| 367 | Staphylococcus auricularis | This patent | atpD |
| 368 | Staphylococcus capitis subsp. capitis | This patent | atpD |
| 369 | Staphylococcus cohnii subsp. cohnii | This patent | atpD |
| 370 | Staphylococcus epidermidis | This patent | atpD |
| 371 | Staphylococcus haemolyticus | This patent | atpD |
| 372 | Staphylococcus hominis subsp. hominis | This patent | atpD |
| 373 | Staphylococcus hominis | This patent | atpD |
| 374 | Staphylococcus lugdunensis | This patent | atpD |
| 375 | Staphylococcus saprophyticus | This patent | atpD |
| 376 | Staphylococcus simulans | This patent | atpD |
| 377 | Staphylococcus wameri | This patent | atpD |
| 378 | Streptococcus acidominimus | This patent | atpD |
| 379 | Streptococcus agalactiae | This patent | atpD |
| 380 | Streptococcus agalactiae | This patent | atpD |
| 381 | Streptococcus agalactiae | This patent | atpD |
| 382 | Streptococcus agalactiae | This patent | atpD |
| 383 | Streptococcus agalactiae | This patent | atpD |
| 384 | Streptococcus dysgalactiae | This patent | atpD |
| 385 | Streptococcus equi subsp. equi | This patent | atpD |
| 386 | Streptococcus anginosus | This patent | atpD |
| 387 | Streptococcus salivarius | This patent | atpD |
| 388 | Streptococcus suis | This patent | atpD |
| 389 | Streptococcus uberis | This patent | atpD |
| 390 | Tatumella ptyseos | This patent | atpD |
| 391 | Trabulsiella guamensis | This patent | atpD |
| 392 | Yersinia bercovieri | This patent | atpD |
| 393 | Yersinia enterocolitica | This patent | atpD |
| 394 | Yersinia frederiksenii | This patent | atpD |
| 395 | Yersinia intermedia | This patent | atpD |
| 396 | Yersinia pseudotuberculosis | This patent | atpD |
| 397 | Yersinia rohdei | This patent | atpD |
| 398 | Yokenella regensburgei | This patent | atpD |
| 399 | Yarrowia lipolytica | This patent | tuf (EF-1) |
| 400 | Absidia corymbifera | This patent | tuf (EF-1) |
| 401 | Alternaria alternata | This patent | tuf (EF-1) |
| 402 | Aspergillus flavus | This patent | tuf (EF-1) |
| 403 | Aspergillus fumigatus | This patent | tuf (EF-1) |
| 404 | Aspergillus fumigatus | This patent | tuf (EF-1) |
| 405 | Aspergillus niger | This patent | tuf (EF-1) |
| 406 | Blastoschizomyces capitatus | This patent | tuf (EF-1) |
| 407 | Candida albicans | This patent | tuf (EF-1) |
| 408 | Candida albicans | This patent | tuf (EF-1) |
| 409 | Candida albicans | This patent | tuf (EF-1) |
| 410 | Candida albicans | This patent | tuf (EF-1) |
| 411 | Candida albicans | This patent | tuf (EF-1) |
| 412 | Candida dubliniensis | This patent | tuf (EF-1) |
| 413 | Candida catenulata | This patent | tuf (EF-1) |
| 414 | Candida dubliniensis | This patent | tuf (EF-1) |
| 415 | Candida dubliniensis | This patent | tuf (EF-1) |
| 416 | Candida famata | This patent | tuf (EF-1) |
| 417 | Candida glabrata | WO98/20157 | tuf (EF-1) |
| 418 | Candida guilliermondii | This patent | tuf (EF-1) |
| 419 | Candida haemulonii | This patent | tuf (EF-1) |
| 420 | Candida inconspicua | This patent | tuf (EF-1) |
| 421 | Candida kefyr | This patent | tuf (EF-1) |
| 422 | Candida krusei | WO98/20157 | tuf (EF-1) |
| 423 | Candida lambica | This patent | tuf (EF-1) |
| 424 | Candida lusitaniae | This patent | tuf (EF-1) |
| 425 | Candida norvegensis | This patent | tuf (EF-1) |
| 426 | Candida parapsilosis | WO98/20157 | tuf (EF-1) |
| 427 | Candida rugosa | This patent | tuf (EF-1) |
| 428 | Candida sphaerica | This patent | tuf (EF-1) |
| 429 | Candida tropicalis | WO98/20157 | tuf (EF-1) |
| 430 | Candida utilis | This patent | tuf (EF-1) |
| 431 | Candida viswanathii | This patent | tuf (EF-1) |
| 432 | Candida zeylanoides | This patent | tuf (EF-1) |
| 433 | Coccidioides immitis | This patent | tuf (EF-1) |
| 434 | Cryptococcus albidus | This patent | tuf (EF-1) |
| 435 | Exophiala jeanselmei | This patent | tuf (EF-1) |
| 436 | Fusarium oxysporum | This patent | tuf (EF-1) |
| 437 | Geotrichum sp. | This patent | tuf (EF-1) |
| 438 | Histoplasma capsulatum | This patent | tuf (EF-1) |
| 439 | Issatchenkia orientalis Kudrjanzev | This patent | tuf (EF-1) |
| 440 | Malassezia furfur | This patent | tuf (EF-1) |
| 441 | Malassezia pachydermatis | This patent | tuf (EF-1) |
| 442 | Malbranchea filamentosa | This patent | tuf (EF-1) |
| 443 | Metschnikowia pulcherrima | This patent | tuf (EF-1) |
| 444 | Paecilomyces lilacinus | This patent | tuf (EF-1) |
| 445 | Paracoccidioides brasiliensis | This patent | tuf (EF-1) |
| 446 | Penicillium marneffei | This patent | tuf (EF-1) |
| 447 | Pichia anomala | This patent | tuf (EF-1) |
| 448 | Pichia anomala | This patent | tuf (EF-1) |
| 449 | Pseudallescheria boydii | This patent | tuf (EF-1) |
| 450 | Rhizopus oryzae | This patent | tuf (EF-1) |
| 451 | Rhodotorula minuta | This patent | tuf (EF-1) |
| 452 | Sporobolomyces salmonicolor | This patent | tuf (EF-1) |
| 453 | Sporothrix schenckii | This patent | tuf (EF-1) |
| 454 | Stephanoascus ciferrii | This patent | tuf (EF-1) |
| 455 | Trichophyton mentagrophytes | This patent | tuf (EF-1) |
| 456 | Trichosporon cutaneum | This patent | tuf (EF-1) |
| 457 | Wangiella dermatitidis | This patent | tuf (EF-1) |
| 458 | Aspergillus fumigatus | This patent | atpD |
| 459 | Blastoschizomyces capitatus | This patent | atpD |
| 460 | Candida albicans | This patent | atpD |
| 461 | Candida dubliniensis | This patent | atpD |
| 462 | Candida famata | This patent | atpD |
| 463 | Candida glabrata | This patent | atpD |
| 464 | Candida guilliermondii | This patent | atpD |
| 465 | Candida haemulonii | This patent | atpD |
| 466 | Candida inconspicua | This patent | atpD |
| 467 | Candida kefyr | This patent | atpD |
| 468 | Candida krusei | This patent | atpD |
| 469 | Candida lambica | This patent | atpD |
| 470 | Candida lusitaniae | This patent | atpD |
| 471 | Candida norvegensis | This patent | atpD |
| 472 | Candida parapsilosis | This patent | atpD |
| 473 | Candida rugosa | This patent | atpD |
| 474 | Candida sphaerica | This patent | atpD |
| 475 | Candida tropicalis | This patent | atpD |
| 476 | Candida utilis | This patent | atpD |
| 477 | Candida viswanathii | This patent | atpD |
| 478 | Candida zeylanoides | This patent | atpD |
| 479 | Coccidioides immitis | This patent | atpD |
| 480 | Cryptococcus albidus | This patent | atpD |
| 481 | Fusarium oxysporum | This patent | atpD |
| 482 | Geotrichum sp. | This patent | atpD |
| 483 | Histoplasma capsulatum | This patent | atpD |
| 484 | Malassezia furfur | This patent | atpD |
| 485 | Malassezia pachydermatis | This patent | atpD |
| 486 | Metschnikowia pulcherrima | This patent | atpD |
| 487 | Penicillium marneffei | This patent | atpD |
| 488 | Pichia anomala | This patent | atpD |
| 489 | Pichia anomala | This patent | atpD |
| 490 | Rhodotorula minuta | This patent | atpD |
| 491 | Rhodotorula mucilaginosa | This patent | atpD |
| 492 | Sporobolomyces salmonicolor | This patent | atpD |
| 493 | Sporothrix schenckii | This patent | atpD |
| 494 | Stephanoascus ciferrii | This patent | atpD |
| 495 | Trichophyton mentagrophytes | This patent | atpD |
| 496 | Wangiella dermatitidis | This patent | atpD |
| 497 | Yarrowia lipolytica | This patent | atpD |
| 498 | Aspergillus fumigatus | This patent | tuf (M) |
| 499 | Blastoschizomyces capitatus | This patent | tuf (M) |
| 500 | Candida rugosa | This patent | tuf (M) |
| 501 | Coccidioides immitis | This patent | tuf (M) |
| 502 | Fusarium oxysporum | This patent | tuf (M) |
| 503 | Histoplasma capsulatum | This patent | tuf (M) |
| 504 | Paracoccidioides brasiliensis | This patent | tuf (M) |
| 505 | Penicillium marneffei | This patent | tuf (M) |
| 506 | Pichia anomala | This patent | tuf (M) |
| 507 | Trichophyton mentagrophytes | This patent | tuf (M) |
| 508 | Yarrowia lipolytica | This patent | tuf (M) |
| 509 | Babesia bigemina | This patent | tuf (EF-1) |
| 510 | Babesia bovis | This patent | tuf (EF-1) |
| 511 | Crithidia fasciculata | This patent | tuf (EF-1) |
| 512 | Entamoeba histolytica | This patent | tuf (EF-1) |
| 513 | Giardia lamblia | This patent | tuf (EF-1) |
| 514 | Leishmania tropica | This patent | tuf (EF-1) |
| 515 | Leishmania aethiopica | This patent | tuf (EF-1) |
| 516 | Leishmania tropica | This patent | tuf (EF-1) |
| 517 | Leishmania donovani | This patent | tuf (EF-1) |
| 518 | Leishmania infantum | This patent | tuf (EF-1) |
| 519 | Leishmania enriettii | This patent | tuf (EF-1) |
| 520 | Leishmania gerbilli | This patent | tuf (EF-1) |
| 521 | Leishmania hertigi | This patent | tuf (EF-1) |
| 522 | Leishmania major | This patent | tuf (EF-1) |
| 523 | Leishmania amazonensis | This patent | tuf (EF-1) |
| 524 | Leishmania mexicana | This patent | tuf (EF-1) |
| 525 | Leishmania tarentolae | This patent | tuf (EF-1) |
| 526 | Leishmania tropica | This patent | tuf (EF-1) |
| 527 | Neospora caninum | This patent | tuf (EF-1) |
| 528 | Trichomonas vaginalis | This patent | tuf (EF-1) |
| 529 | Trypanosoma brucei subsp. brucei | This patent | tuf (EF-1) |
| 530 | Crithidia fasciculata | This patent | atpD |
| 531 | Leishmania tropica | This patent | atpD |
| 532 | Leishmania aethiopica | This patent | atpD |
| 533 | Leishmania donovani | This patent | atpD |
| 534 | Leishmania infantum | This patent | atpD |
| 535 | Leishmania gerbilli | This patent | atpD |
| 536 | Leishmania hertigi | This patent | atpD |
| 537 | Leishmania major | This patent | atpD |
| 538 | Leishmania amazonensis | This patent | atpD |
| 607 | Enterococcus faecalis | WO98/20157 | tuf |
| 608 | Enterococcus faecium | WO98/20157 | tuf |
| 609 | Enterococcus gallinarum | WO98/20157 | tuf |
| 610 | Haemophilus influenzae | WO98/20157 | tuf |
| 611 | Staphylococcus epidermidis | WO98/20157 | tuf |
| 612 | Salmonella choleraesuis subsp. choleraesuis | This patent | tuf |
| | serotype Paratyphi A | | |
| 613 | Serratia ficaria | This patent | tuf |
| 614 | Enterococcus malodoratus | This patent | tuf (C) |
| 615 | Enterococcus durans | This patent | tuf (C) |
| 616 | Enterococcus pseudoavium | This patent | tuf (C) |
| 617 | Enterococcus dispar | This patent | tuf (C) |
| 618 | Enterococcus avium | This patent | tuf (C) |
| 619 | Saccharomyces cerevisiae | Database | tuf (M) |
| 621 | Enterococcus faecium | This patent | tuf (C) |
| 622 | Saccharomyces cerevisiae | This patent | tuf (EF-1) |
| 623 | Cryptococcus neoformans | This patent | tuf (EF-1) |
| 624 | Candida albicans | WO98/20157 | tuf (EF-1) |
| 662 | Corynebacterium diphtheriae | WO98/20157 | tuf |
| 663 | Candida catenulata | This patent | atpD |
| 665 | Saccharomyces cerevisiae | Database | tuf (EF-1) |
| 666 | Saccharomyces cerevisiae | Database | atpD |
| 667 | Trypanosoma cruzi | This patent | atpD |
| 668 | Corynebacterium glutamicum | Database | tuf |
| 669 | Escherichia coli | Database | atpD |
| 670 | Helicobacter pylori | Database | atpD |
| 671 | Clostridium acetobutylicum | Database | atpD |
| 672 | Cytophaga lytica | Database | atpD |
| 673 | Ehrlichia risticii | This patent | atpD |
| 674 | Vibrio cholerae | This patent | atpD |
| 675 | Vibrio cholerae | This patent | tuf |
| 676 | Leishmania enriettii | This patent | atpD |
| 677 | Babesia microti | This patent | tuf (EF-1) |
| 678 | Cryptococcus neoformans | This patent | atpD |
| 679 | Cryptococcus neoformans | This patent | atpD |
| 680 | Cunninghamella bertholletiae | This patent | atpD |
| 684 | Candida tropicalis | Database | atpD (V) |
| 685 | Enterococcus hirae | Database | atpD (V) |
| 686 | Chlamydia pneumoniae | Database | atpD (V) |
| 687 | Halobacterium salinarum | Database | atpD (V) |
| 688 | Homo sapiens | Database | atpD (V) |
| 689 | Plasmodium falciparum | Database | atpD (V) |
| 690 | Saccharomyces cerevisiae | Database | atpD (V) |
| 691 | Schizosaccharomyces pombe | Database | atpD (V) |
| 692 | Trypanosoma congolense | Database | atpD (V) |
| 693 | Thermus thermophilus | Database | atpD (V) |
| 698 | Escherichia coli | WO98/20157 | tuf |
| 709 | Borrelia burgdorferi | Database | atpD (V) |
| 710 | Treponema pallidum | Database | atpD (V) |
| 711 | Chlamydia trachomatis | Genome project | atpD (V) |
| 712 | Enterococcus faecalis | Genome project | atpD (V) |
| 713 | Methanosarcina barkeri | Database | atpD (V) |
| 714 | Methanococcus jannaschii | Database | atpD (V) |
| 715 | Porphyromonas gingivalis | Genome project | atpD (V) |
| 716 | Streptococcus pneumoniae | Genome project | atpD (V) |
| 717 | Burkholderia mallei | This patent | tuf |
| 718 | Burkholderia pseudomallei | This patent | tuf |
| 719 | Clostridium beijerinckii | This patent | tuf |
| 720 | Clostridium innocuum | This patent | tuf |
| 721 | Clostridium novyi | This patent | tuf |
| 722 | Clostridium septicum | This patent | tuf |
| 723 | Clostridium tertium | This patent | tuf |
| 724 | Clostridium tetani | This patent | tuf |
| 725 | Enterococcus malodoratus | This patent | tuf |
| 726 | Enterococcus sulfureus | This patent | tuf |
| 727 | Lactococcus garvieae | This patent | tuf |
| 728 | Mycoplasma pirum | This patent | tuf |
| 729 | Mycoplasma salivarium | This patent | tuf |
| 730 | Neisseria polysaccharea | This patent | tuf |
| 731 | Salmonella choleraesuis subsp. choleraesuis | This patent | tuf |
| | serotype Enteritidis | | |
| 732 | Salmonella choleraesuis subsp. choleraesuis | This patent | tuf |
| | serotype Gallinarum | | |
| 733 | Salmonella choleraesuis subsp. choleraesuis | This patent | tuf |
| | serotype Paratyphi B | | |
| 734 | Salmonella choleraesuis subsp. choleraesuis | This patent | tuf |
| | serotype Virchow | | |
| 735 | Serratia grimesii | This patent | tuf |
| 736 | Clostridium difficile | This patent | tuf |
| 737 | Burkholderia pseudomallei | This patent | atpD |
| 738 | Clostridium bifermentans | This patent | atpD |
| 739 | Clostridium beijerinckii | This patent | atpD |
| 740 | Clostridium difficile | This patent | atpD |
| 741 | Clostridium ramosum | This patent | atpD |
| 742 | Clostridium septicum | This patent | atpD |
| 743 | Clostridium tertium | This patent | atpD |
| 744 | Comamonas acidovorans | This patent | atpD |
| 745 | Klebsiella pneumoniae subsp. rhinoscleromatis | This patent | atpD |
| 746 | Neisseria canis | This patent | atpD |
| 747 | Neisseria cinerea | This patent | atpD |
| 748 | Neisseria cuniculi | This patent | atpD |
| 749 | Neisseria elongata subsp. elongata | This patent | atpD |
| 750 | Neisseria flavescens | This patent | atpD |
| 751 | Neisseria gonorrhoeae | This patent | atpD |
| 752 | Neisseria gonorrhoeae | This patent | atpD |
| 753 | Neisseria lactamica | This patent | atpD |
| 754 | Neisseria meningitidis | This patent | atpD |
| 755 | Neisseria mucosa | This patent | atpD |
| 756 | Neisseria subflava | This patent | atpD |
| 757 | Neisseria weaveri | This patent | atpD |
| 758 | Neisseria animalis | This patent | atpD |
| 759 | Proteus penneri | This patent | atpD |
| 760 | Salmonella choleraesuis subsp. choleraesuis | This patent | atpD |
| | serotype Enteritidis | | |
| 761 | Yersinia pestis | This patent | atpD |
| 762 | Burkholderia mallei | This patent | atpD |
| 763 | Clostridium sordellii | This patent | atpD |
| 764 | Clostridium novyi | This patent | atpD |
| 765 | Clostridium botulinum | This patent | atpD |
| 766 | Clostridium histolyticum | This patent | atpD |
| 767 | Peptostreptococcus prevotii | This patent | atpD |
| 768 | Absidia corymbifera | This patent | atpD |
| 769 | Alternaria alternata | This patent | atpD |
| 770 | Aspergillus flavus | This patent | atpD |
| 771 | Mucor circinelloides | This patent | atpD |
| 772 | Piedraia hortai | This patent | atpD |
| 773 | Pseudallescheria boydii | This patent | atpD |
| 774 | Rhizopus oryzae | This patent | atpD |
| 775 | Scopulariopsis koningii | This patent | atpD |
| 776 | Trichophyton mentagrophytes | This patent | atpD |
| 777 | Trichophyton tonsurans | This patent | atpD |
| 778 | Trichosporon cutaneum | This patent | atpD |
| 779 | Cladophialophora carrionii | This patent | tuf (EF-1) |
| 780 | Cunninghamella bertholletiae | This patent | tuf (EF-1) |
| 781 | Curvularia lunata | This patent | tuf (EF-1) |
| 782 | Fonsecaea pedrosoi | This patent | tuf (EF-1) |
| 783 | Microsporum audouinii | This patent | tuf (EF-1) |
| 784 | Mucor circinelloides | This patent | tuf (EF-1) |
| 785 | Phialophora verrucosa | This patent | tuf (EF-1) |
| 786 | Saksenaea vasiformis | This patent | tuf (EF-1) |
| 787 | Syncephalastrum racemosum | This patent | tuf (EF-1) |
| 788 | Trichophyton tonsurans | This patent | tuf (EF-1) |
| 789 | Trichophyton mentagrophytes | This patent | tuf (EF-1) |
| 790 | Bipolaris hawaiiensis | This patent | tuf (EF-1) |
| 791 | Aspergillus fumigatus | This patent | tuf (M) |
| 792 | Trichophyton mentagrophytes | This patent | tuf (M) |
| 827 | Clostridium novyi | This patent | atpD (V) |
| 828 | Clostridium difficile | This patent | atpD (V) |
| 829 | Clostridium septicum | This patent | atpD (V) |
| 830 | Clostridium botulinum | This patent | atpD (V) |
| 831 | Clostridium perfringens | This patent | atpD (V) |
| 832 | Clostridium tetani | This patent | atpD (V) |
| 833 | Streptococcus pyogenes | Database | atpD (V) |
| 834 | Babesia bovis | This patent | atpD (V) |
| 835 | Cryptosporidium parvum | This patent | atpD (V) |
| 836 | Leishmania infantum | This patent | atpD (V) |
| 837 | Leishmania major | This patent | atpD (V) |
| 838 | Leishmania tarentolae | This patent | atpD (V) |
| 839 | Trypanosoma brucei | This patent | atpD (V) |
| 840 | Trypanosoma cruzi | This patent | tuf (EF-1) |
| 841 | Trypanosoma cruzi | This patent | tuf (EF-1) |
| 842 | Trypanosoma cruzi | This patent | tuf (EF-1) |
| 843 | Babesia bovis | This patent | tuf (M) |
| 844 | Leishmania aethiopica | This patent | tuf (M) |
| 845 | Leishmania amazonensis | This patent | tuf (M) |
| 846 | Leishmania donovani | This patent | tuf (M) |
| 847 | Leishmania infantum | This patent | tuf (M) |
| 848 | Leishmania enriettii | This patent | tuf (M) |
| 849 | Leishmania gerbilli | This patent | tuf (M) |
| 850 | Leishmania major | This patent | tuf (M) |
| 851 | Leishmania mexicana | This patent | tuf (M) |
| 852 | Leishmania tarentolae | This patent | tuf (M) |
| 853 | Trypanosoma cruzi | This patent | tuf (M) |
| 854 | Trypanosoma cruzi | This patent | tuf (M) |
| 855 | Trypanosoma cruzi | This patent | tuf (M) |
| 856 | Babesia bigemina | This patent | atpD |
| 857 | Babesia bovis | This patent | atpD |
| 858 | Babesia microti | This patent | atpD |
| 859 | Leishmania guyanensis | This patent | atpD |
| 860 | Leishmania mexicana | This patent | atpD |
| 861 | Leishmania tropica | This patent | atpD |
| 862 | Leishmania tropica | This patent | atpD |
| 863 | Bordetella pertussis | Database | tuf |
| 864 | Trypanosoma brucei brucei | Database | tuf (EF-1) |
| 865 | Cryptosporidium parvum | This patent | tuf (EF-1) |
| 866 | Staphylococcus saprophyticus | This patent | atpD |
| 867 | Zoogloea ramigera | This patent | atpD |
| 868 | Staphylococcus saprophyticus | This patent | tuf |
| 869 | Enterococcus casseliflavus | This patent | tuf |
| 870 | Enterococcus casseliflavus | This patent | tuf |
| 871 | Enterococcus flavescens | This patent | tuf |
| 872 | Enterococcus gallinarum | This patent | tuf |
| 873 | Enterococcus gallinarum | This patent | tuf |
| 874 | Staphylococcus haemolyticus | This patent | tuf |
| 875 | Staphylococcus epidermidis | This patent | tuf |
| 876 | Staphylococcus epidermidis | This patent | tuf |
| 877 | Staphylococcus epidermidis | This patent | tuf |
| 878 | Staphylococcus epidermidis | This patent | tuf |
| 879 | Enterococcus gallinarum | This patent | tuf |
| 880 | Pseudomonas aeruginosa | This patent | tuf |
| 881 | Enterococcus casseliflavus | This patent | tuf |
| 882 | Enterococcus casseliflavus | This patent | tuf |
| 883 | Enterococcus faecalis | This patent | tuf |
| 884 | Enterococcus faecalis | This patent | tuf |
| 885 | Enterococcus faecium | This patent | tuf |
| 886 | Enterococcus faecium | This patent | tuf |
| 887 | Zoogloea ramigera | This patent | tuf |
| 888 | Enterococcus faecalis | This patent | tuf |
| 889 | Aspergillus fumigatus | This patent | atpD |
| 890 | Penicillium marneffei | This patent | atpD |
| 891 | Paecilomyces lilacinus | This patent | atpD |
| 892 | Penicillium marneffei | This patent | atpD |
| 893 | Sporothrix schenckii | This patent | atpD |
| 894 | Malbranchea filamentosa | This patent | atpD |
| 895 | Paecilomyces lilacinus | This patent | atpD |
| 896 | Aspergillus niger | This patent | atpD |
| 897 | Aspergillus fumigatus | This patent | tuf (EF-1) |
| 898 | Penicillium marneffei | This patent | tuf (EF-1) |
| 899 | Piedraia hortai | This patent | tuf (EF-1) |
| 900 | Paecilomyces lilacinus | This patent | tuf (EF-1) |
| 901 | Paracoccidioides brasiliensis | This patent | tuf (EF-1) |
| 902 | Sporothrix schenckii | This patent | tuf (EF-1) |
| 903 | Penicillium marneffei | This patent | tuf (EF-1) |
| 904 | Curvularia lunata | This patent | tuf (M) |
| 905 | Aspergillus niger | This patent | tuf (M) |
| 906 | Bipolaris hawaiiensis | This patent | tuf (M) |
| 907 | Aspergillus flavus | This patent | tuf (M) |
| 908 | Alternaria alternata | This patent | tuf (M) |
| 909 | Penicillium marneffei | This patent | tuf (M) |
| 910 | Penicillium marneffei | This patent | tuf (M) |
| 918 | Escherichia coli | Database | recA |
| 929 | Bacteroides fragilis | This patent | atpD (V) |
| 930 | Bacteroides distasonis | This patent | atpD (V) |
| 931 | Porphyromonas asaccharolytica | This patent | atpD (V) |
| 932 | Listeria monocytogenes | This patent | tuf |
| 939 | Saccharomyces cerevisiae | Database | recA (Rad51) |
| 940 | Saccharomyces cerevisiae | Database | recA (Dmc1) |
| 941 | Cryptococcus humicolus | This patent | atpD |
| 942 | Escherichia coli | This patent | atpD |
| 943 | Escherichia coli | This patent | atpD |
| 944 | Escherichia coli | This patent | atpD |
| 945 | Escherichia coli | This patent | atpD |
| 946 | Neisseria polysaccharea | This patent | atpD |
| 947 | Neisseria sicca | This patent | atpD |
| 948 | Streptococcus mitis | This patent | atpD |
| 949 | Streptococcus mitis | This patent | atpD |
| 950 | Streptococcus mitis | This patent | atpD |
| 951 | Streptococcus oralis | This patent | atpD |
| 952 | Streptococcus pneumoniae | This patent | atpD |
| 953 | Streptococcus pneumoniae | This patent | atpD |
| 954 | Streptococcus pneumoniae | This patent | atpD |
| 955 | Streptococcus pneumoniae | This patent | atpD |
| 956 | Babesia microti | This patent | atpD (V) |
| 957 | Entamoeba histolytica | This patent | atpD (V) |
| 958 | Fusobacterium nucleatum subsp. polymorphum | This patent | atpD (V) |
| 959 | Leishmania aethiopica | This patent | atpD (V) |
| 960 | Leishmania tropica | This patent | atpD (V) |
| 961 | Leishmania guyanensis | This patent | atpD (V) |
| 962 | Leishmania donovani | This patent | atpD (V) |
| 963 | Leishmania hertigi | This patent | atpD (V) |
| 964 | Leishmania mexicana | This patent | atpD (V) |
| 965 | Leishmania tropica | This patent | atpD (V) |
| 966 | Peptostreptococcus anaerobius | This patent | atpD (V) |
| 967 | Bordetella pertussis | This patent | tuf |
| 968 | Bordetella pertussis | This patent | tuf |
| 969 | Enterococcus columbae | This patent | tuf |
| 970 | Enterococcus flavescens | This patent | tuf |
| 971 | Streptococcus pneumoniae | This patent | tuf |
| 972 | Escherichia coli | This patent | tuf |
| 973 | Escherichia coli | This patent | tuf |
| 974 | Escherichia coli | This patent | tuf |
| 975 | Escherichia coli | This patent | tuf |
| 976 | Mycobacterium avium | This patent | tuf |
| 977 | Streptococcus pneumoniae | This patent | tuf |
| 978 | Mycobacterium gordonae | This patent | tuf |
| 979 | Streptococcus pneumoniae | This patent | tuf |
| 980 | Mycobacterium tuberculosis | This patent | tuf |
| 981 | Staphylococcus warneri | This patent | tuf |
| 982 | Streptococcus mitis | This patent | tuf |
| 983 | Streptococcus mitis | This patent | tuf |
| 984 | Streptococcus mitis | This patent | tuf |
| 985 | Streptococcus oralis | This patent | tuf |
| 986 | Streptococcus pneumoniae | This patent | tuf |
| 987 | Enterococcus hirae | This patent | tuf (C) |
| 988 | Enterococcus mundtii | This patent | tuf (C) |
| 989 | Enterococcus raffinosus | This patent | tuf (C) |
| 990 | Bacillus anthracis | This patent | recA |
| 991 | Prevotella melaninogenica | This patent | recA |
| 992 | Enterococcus casseliflavus | This patent | tuf |
| 993 | Streptococcus pyogenes | Database | speA |
| 1002 | Streptococcus pyogenes | WO98/20157 | tuf |
| 1003 | Bacillus cereus | This patent | recA |
| 1004 | Streptococcus pneumoniae | This patent | pbp1a |
| 1005 | Streptococcus pneumoniae | This patent | pbp1a |
| 1006 | Streptococcus pneumoniae | This patent | pbp1a |
| 1007 | Streptococcus pneumoniae | This patent | pbp1a |
| 1008 | Streptococcus pneumoniae | This patent | pbp1a |
| 1009 | Streptococcus pneumoniae | This patent | pbp1a |
| 1010 | Streptococcus pneumoniae | This patent | pbp1a |
| 1011 | Streptococcus pneumoniae | This patent | pbp1a |
| 1012 | Streptococcus pneumoniae | This patent | pbp1a |
| 1013 | Streptococcus pneumoniae | This patent | pbp1a |
| 1014 | Streptococcus pneumoniae | This patent | pbp1a |
| 1015 | Streptococcus pneumoniae | This patent | pbp1a |
| 1016 | Streptococcus pneumoniae | This patent | pbp1a |
| 1017 | Streptococcus pneumoniae | This patent | pbp1a |
| 1018 | Streptococcus pneumoniae | This patent | pbp1a |
| 1019 | Streptococcus pneumoniae | This patent | pbp2b |
| 1020 | Streptococcus pneumoniae | This patent | pbp2b |
| 1021 | Streptococcus pneumoniae | This patent | pbp2b |
| 1022 | Streptococcus pneumoniae | This patent | pbp2b |
| 1023 | Streptococcus pneumoniae | This patent | pbp2b |
| 1024 | Streptococcus pneumoniae | This patent | pbp2b |
| 1025 | Streptococcus pneumoniae | This patent | pbp2b |
| 1026 | Streptococcus pneumoniae | This patent | pbp2b |
| 1027 | Streptococcus pneumoniae | This patent | pbp2b |
| 1028 | Streptococcus pneumoniae | This patent | pbp2b |
| 1029 | Streptococcus pneumoniae | This patent | pbp2b |
| 1030 | Streptococcus pneumoniae | This patent | pbp2b |
| 1031 | Streptococcus pneumoniae | This patent | pbp2b |
| 1032 | Streptococcus pneumoniae | This patent | pbp2b |
| 1033 | Streptococcus pneumoniae | This patent | pbp2b |
| 1034 | Streptococcus pneumoniae | This patent | pbp2x |
| 1035 | Streptococcus pneumoniae | This patent | pbp2x |
| 1036 | Streptococcus pneumoniae | This patent | pbp2x |
| 1037 | Streptococcus pneumoniae | This patent | pbp2x |
| 1038 | Streptococcus pneumoniae | This patent | pbp2x |
| 1039 | Streptococcus pneumoniae | This patent | pbp2x |
| 1040 | Streptococcus pneumoniae | This patent | pbp2x |
| 1041 | Streptococcus pneumoniae | This patent | pbp2x |
| 1042 | Streptococcus pneumoniae | This patent | pbp2x |
| 1043 | Streptococcus pneumoniae | This patent | pbp2x |
| 1044 | Streptococcus pneumoniae | This patent | pbp2x |
| 1045 | Streptococcus pneumoniae | This patent | pbp2x |
| 1046 | Streptococcus pneumoniae | This patent | pbp2x |
| 1047 | Streptococcus pneumoniae | This patent | pbp2x |
| 1048 | Streptococcus pneumoniae | This patent | pbp2x |
| 1049 | Enterococcus faecium | This patent | vanA |
| 1050 | Enterococcus gallinarum | This patent | vanA |
| 1051 | Enterococcus faecium | This patent | vanA |
| 1052 | Enterococcus faecium | This patent | vanA |
| 1053 | Enterococcus faecium | This patent | vanA |
| 1054 | Enterococcus faecalis | This patent | vanA |
| 1055 | Enterococcus gallinarum | This patent | vanA |
| 1056 | Enterococcus faecium | This patent | vanA |
| 1057 | Enterococcus flavescens | This patent | vanA |
| 1058 | Enterococcus gallinarum | This patent | vanC1 |
| 1059 | Enterococcus gallinarum | This patent | vanC1 |
| 1060 | Enterococcus casseliflavus | This patent | vanC2 |
| 1061 | Enterococcus casseliflavus | This patent | vanC2 |
| 1062 | Enterococcus casseliflavus | This patent | vanC2 |
| 1063 | Enterococcus casseliflavus | This patent | vanC2 |
| 1064 | Enterococcus flavescens | This patent | vanC3 |
| 1065 | Enterococcus flavescens | This patent | vanC3 |
| 1066 | Enterococcus flavescens | This patent | vanC3 |
| 1067 | Enterococcus faecium | This patent | vanXY |
| 1068 | Enterococcus faecium | This patent | vanXY |
| 1069 | Enterococcus faecium | This patent | vanXY |
| 1070 | Enterococcus faecalis | This patent | vanXY |
| 1071 | Enterococcus gallinarum | This patent | vanXY |
| 1072 | Enterococcus faecium | This patent | vanXY |
| 1073 | Enterococcus flavescens | This patent | vanXY |
| 1074 | Enterococcus faecium | This patent | vanXY |
| 1075 | Enterococcus gallinarum | This patent | vanXY |
| 1076 | Escherichia coli | Database | stx₁ |
| 1077 | Escherichia coli | Database | stx₂ |
| 1093 | Staphylococcus saprophyticus | This patent | unknown |
| 1117 | Enterococcus faecium | Database | vanB |
| 1138 | Enterococcus gallinarum | Database | vanC1 |
| 1139 | Enterococcus faecium | Database | vanA |
| 1140 | Enterococcus casseliflavus | Database | vanC2 |
| 1141 | Enterococcus faecium | Database | vanHAXY |
| 1169 | Streptococcus pneumoniae | Database | pbp1a |
| 1172 | Streptococcus pneumoniae | Database | pbp2b |
| 1173 | Streptococcus pneumoniae | Database | pbp2x |
| 1178 | Staphylococcus aureus | Database | mecA |
| 1183 | Streptococcus pneumoniae | Database | hexA |
| 1184 | Streptococcus pneumoniae | This patent | hexA |
| 1185 | Streptococcus pneumoniae | This patent | hexA |
| 1186 | Streptococcus pneumoniae | This patent | hexA |
| 1187 | Streptococcus pneumoniae | This patent | hexA |
| 1188 | Streptococcus oralis | This patent | hexA |
| 1189 | Streptococcus mitis | This patent | hexA |
| 1190 | Streptococcus mitis | This patent | hexA |
| 1191 | Streptococcus mitis | This patent | hexA |
| 1198 | Staphylococcus saprophyticus | This patent | unknown |
| 1215 | Streptococcus pyogenes | Database | pcp |
| 1230 | Escherichia coli | Database | tuf (EF-G) |
| 1242 | Enterococcus faecium | Database | ddl |
| 1243 | Enterococcus faecalis | Database | mtlF, mtlD |
| 1244 | Staphylococcus aureus subsp. aureus | This patent | unknown |
| 1245 | Bacillus anthracis | This patent | atpD |
| 1246 | Bacillus mycoides | This patent | atpD |
| 1247 | Bacillus thuringiensis | This patent | atpD |
| 1248 | Bacillus thuringiensis | This patent | atpD |
| 1249 | Bacillus thuringiensis | This patent | atpD |
| 1250 | Bacillus weihenstephanensis | This patent | atpD |
| 1251 | Bacillus thuringiensis | This patent | atpD |
| 1252 | Bacillus thuringiensis | This patent | atpD |
| 1253 | Bacillus cereus | This patent | atpD |
| 1254 | Bacillus cereus | This patent | atpD |
| 1255 | Staphylococcus aureus | This patent | gyrA |
| 1256 | Bacillus weihenstephanensis | This patent | atpD |
| 1257 | Bacillus anthracis | This patent | atpD |
| 1258 | Bacillus thuringiensis | This patent | atpD |
| 1259 | Bacillus cereus | This patent | atpD |
| 1260 | Bacillus cereus | This patent | atpD |
| 1261 | Bacillus thuringiensis | This patent | atpD |
| 1262 | Bacillus thuringiensis | This patent | atpD |
| 1263 | Bacillus thuringiensis | This patent | atpD |
| 1264 | Bacillus thuringiensis | This patent | atpD |
| 1265 | Bacillus anthracis | This patent | atpD |
| 1266 | Paracoccidioides brasiliensis | This patent | tuf (EF-1) |
| 1267 | Blastomyces dermatitidis | This patent | tuf (EF-1) |
| 1268 | Histoplasma capsulatum | This patent | tuf (EF-1) |
| 1269 | Trichophyton rubrum | This patent | tuf (EF-1) |
| 1270 | Microsporum canis | This patent | tuf (EF-1) |
| 1271 | Aspergillus versicolor | This patent | tuf (EF-1) |
| 1272 | Exophiala moniliae | This patent | tuf (EF-1) |
| 1273 | Hortaea wemeckii | This patent | tuf (EF-1) |
| 1274 | Fusarium solani | This patent | tuf (EF-1) |
| 1275 | Aureobasidium pullulans | This patent | tuf (EF-1) |
| 1276 | Blastomyces dermatitidis | This patent | tuf (EF-1) |
| 1277 | Exophiala dermatitidis | This patent | tuf (EF-1) |
| 1278 | Fusarium moniliforme | This patent | tuf (EF-1) |
| 1279 | Aspergillus terreus | This patent | tuf (EF-1) |
| 1280 | Aspergillus fumigatus | This patent | tuf (EF-1) |
| 1281 | Cryptococcus laurentii | This patent | tuf (EF-1) |
| 1282 | Emmonsia parva | This patent | tuf (EF-1) |
| 1283 | Fusarium solani | This patent | tuf (EF-1) |
| 1284 | Sporothrix schenckii | This patent | tuf (EF-1) |
| 1285 | Aspergillus nidulans | This patent | tuf (EF-1) |
| 1286 | Cladophialophora carrionii | This patent | tuf (EF-1) |
| 1287 | Exserohilum rostratum | This patent | tuf (EF-1) |
| 1288 | Bacillus thuringiensis | This patent | recA |
| 1289 | Bacillus thuringiensis | This patent | recA |
| 1299 | Staphylococcus aureus | Database | gyrA |
| 1300 | Escherichia coli | Database | gyrA |
| 1307 | Staphylococcus aureus | Database | gyrB |
| 1320 | Escherichia coli | Database | parC (grlA) |
| 1321 | Staphylococcus aureus | Database | parC (grlA) |
| 1328 | Staphylococcus aureus | Database | parE (grlB) |
| 1348 | unidentified bacterium | Database | aac2Ia |
| 1351 | Pseudomonas aeruginosa | Database | aac3Ib |
| 1356 | Serratia marcescens | Database | aac3IIb |
| 1361 | Escherichia coli | Database | aac3IVa |
| 1366 | Enterobacter cloacae | Database | aac3VIa |
| 1371 | Citrobacter koseri | Database | aac6Ia |
| 1376 | Serratia marcescens | Database | aac6Ic |
| 1381 | Escherichia coli | Database | ant3Ia |
| 1386 | Staphylococcus aureus | Database | ant4Ia |
| 1391 | Escherichia coli | Database | aph3Ia |
| 1396 | Escherichia coli | Database | aph3IIa |
| 1401 | Enterococcus faecalis | Database | aph3IIIa |
| 1406 | Acinetobacter baumannii | Database | aph3VIa |
| 1411 | Pseudomonas aeruginosa | Database | blaCARB |
| 1416 | Klebsiella pneumoniae | Database | blaCMY-2 |
| 1423 | Escherichia coli | Database | blaCTX-M-1 |
| 1428 | Salmonella choleraesuis subsp. choleraesuis serotype | Database | blaCTX-M-2 |
| | Typhimurium | | |
| 1433 | Pseudomonas aeruginosa | Database | blaIMP |
| 1438 | Escherichia coli | Database | blaOXA2 |
| 1439 | Pseudomonas aeruginosa | Database | blaOXA10 |
| 1442 | Pseudomonas aeruginosa | Database | blaPER1 |
| 1445 | Salmonella choleraesuis subsp. choleraesuis serotype | Database | blaPER2 |
| | Typhimurium | | |
| 1452 | Staphylococcus epidermidis | Database | dfrA |
| 1461 | Escherichia coli | Database | dhfrIa |
| 1470 | Escherichia coli | Database | dhfrIb |
| 1475 | Escherichia coli | Database | dhfrV |
| 1480 | Proteus mirabilis | Database | dhfrVI |
| 1489 | Escherichia coli | Database | dhfrVII |
| 1494 | Escherichia coli | Database | dhfrVIII |
| 1499 | Escherichia coli | Database | dhfrIX |
| 1504 | Escherichia coli | Database | dhfrXII |
| 1507 | Escherichia coli | Database | dhfrXIII |
| 1512 | Escherichia coli | Database | dhfrXV |
| 1517 | Escherichia coli | Database | dhfrXVII |
| 1518 | Acinetobacter lwoffii | This patent | fusA |
| 1519 | Acinetobacter lwoffii | This patent | fusA-tuf spacer |
| 1520 | Acinetobacter lwoffii | This patent | tuf |
| 1521 | Haemophilus influenzae | This patent | fusA |
| 1522 | Haemophilus influenzae | This patent | fusA-tuf spacer |
| 1523 | Haemophilus influenzae | This patent | tuf |
| 1524 | Proteus mirabilis | This patent | fusA |
| 1525 | Proteus mirabilis | This patent | fusA-tuf spacer |
| 1526 | Proteus mirabilis | This patent | tuf |
| 1527 | Campylobacter curvus | This patent | atpD |
| 1530 | Escherichia coli | Database | ereA |
| 1535 | Escherichia coli | Database | ereB |
| 1540 | Staphylococcus haemolyticus | Database | linA |
| 1545 | Enterococcus faecium | Database | linB |
| 1548 | Streptococcus pyogenes | Database | mefA |
| 1551 | Streptococcus pneumoniae | Database | mefE |
| 1560 | Escherichia coli | Database | mphA |
| 1561 | Candida albicans | This patent | tuf (EF-1) |
| 1562 | Candida dubliniensis | This patent | tuf (EF-1) |
| 1563 | Candida famata | This patent | tuf (EF-1) |
| 1564 | Candida glabrata | This patent | tuf (EF-1) |
| 1565 | Candida guilliermondii | This patent | tuf (EF-1) |
| 1566 | Candida haemulonii | This patent | tuf (EF-1) |
| 1567 | Candida kefyr | This patent | tuf (EF-1) |
| 1568 | Candida lusitaniae | This patent | tuf (EF-1) |
| 1569 | Candida sphaerica | This patent | tuf (EF-1) |
| 1570 | Candida tropicalis | This patent | tuf (EF-1) |
| 1571 | Candida viswanathii | This patent | tuf (EF-1) |
| 1572 | Alcaligenes faecalis subsp. faecalis | This patent | tuf |
| 1573 | Prevotella buccalis | This patent | tuf |
| 1574 | Succinivibrio dextrinosolvens | This patent | tuf |
| 1575 | Tetragenococcus halophilus | This patent | tuf |
| 1576 | Campylobacter jejuni subsp. jejuni | This patent | atpD |
| 1577 | Campylobacter rectus | This patent | atpD |
| 1578 | Enterococcus casseliflavus | This patent | fusA |
| 1579 | Enterococcus gallinarum | This patent | fusA |
| 1580 | Streptococcus mitis | This patent | fusA |
| 1585 | Enterococcus faecium | Database | satG |
| 1590 | Cloning vector pFW16 | Database | tetM |
| 1594 | Enterococcus faecium | Database | vanD |
| 1599 | Enterococcus faecalis | Database | vanE |
| 1600 | Campylobacter jejuni subsp. doylei | This patent | atpD |
| 1601 | Enterococcus sulfureus | This patent | atpD |
| 1602 | Enterococcus solitarius | This patent | atpD |
| 1603 | Campylobacter sputorum subsp. sputorum | This patent | atpD |
| 1604 | Enterococcus pseudoavium | This patent | atpD |
| 1607 | Klebsiella omithinolytica | This patent | gyrA |
| 1608 | Klebsiella oxytoca | This patent | gyrA |
| 1613 | Staphylococcus aureus | Database | vatB |
| 1618 | Staphylococcus cohnii | Database | vatC |
| 1623 | Staphylococcus aureus | Database | vga |
| 1628 | Staphylococcus aureus | Database | vgaB |
| 1633 | Staphylococcus aureus | Database | vgb |
| 1638 | Aspergillus fumigatus | This patent | atpD |
| 1639 | Aspergillus fumigatus | This patent | atpD |
| 1640 | Bacillus mycoides | This patent | atpD |
| 1641 | Bacillus mycoides | This patent | atpD |
| 1642 | Bacillus mycoides | This patent | atpD |
| 1643 | Bacillus pseudomycoides | This patent | atpD |
| 1644 | Bacillus pseudomycoides | This patent | atpD |
| 1645 | Budvicia aquatica | This patent | atpD |
| 1646 | Buttiauxella agrestis | This patent | atpD |
| 1647 | Candida norvegica | This patent | atpD |
| 1648 | Streptococcus pneumoniae | This patent | pbp1a |
| 1649 | Campylobacter lari | This patent | atpD |
| 1650 | Coccidioides immitis | This patent | atpD |
| 1651 | Emmonsia parva | This patent | atpD |
| 1652 | Erwinia amylovora | This patent | atpD |
| 1653 | Fonsecaea pedrosoi | This patent | atpD |
| 1654 | Fusarium moniliforme | This patent | atpD |
| 1655 | Klebsiella oxytoca | This patent | atpD |
| 1656 | Microsporum audouinii | This patent | atpD |
| 1657 | Obesumbacterium proteus | This patent | atpD |
| 1658 | Paracoccidioides brasiliensis | This patent | atpD |
| 1659 | Plesiomonas shigelloides | This patent | atpD |
| 1660 | Shewanella putrefaciens | This patent | atpD |
| 1662 | Campylobacter curvus | This patent | tuf |
| 1663 | Campylobacter rectus | This patent | tuf |
| 1664 | Fonsecaea pedrosoi | This patent | tuf |
| 1666 | Microsporum audouinii | This patent | tuf |
| 1667 | Piedraia hortai | This patent | tuf |
| 1668 | Escherichia coli | Database | tuf |
| 1669 | Saksenaea vasiformis | This patent | tuf |
| 1670 | Trichophyton tonsurans | This patent | tuf |
| 1671 | Enterobacter aerogenes | This patent | atpD |
| 1672 | Bordetella pertussis | Database | atpD |
| 1673 | Arcanobacterium haemolyticum | This patent | tuf |
| 1674 | Butyrivibrio fibrisolvens | This patent | tuf |
| 1675 | Campylobacter jejuni subsp. doylei | This patent | tuf |
| 1676 | Campylobacter lari | This patent | tuf |
| 1677 | Campylobacter sputorum subsp. sputorum | This patent | tuf |
| 1678 | Campylobacter upsaliensis | This patent | tuf |
| 1679 | Globicatella sanguis | This patent | tuf |
| 1680 | Lactobacillus acidophilus | This patent | tuf |
| 1681 | Leuconostoc mesenteroides subsp. dextranicum | This patent | tuf |
| 1682 | Prevotella buccalis | This patent | tuf |
| 1683 | Ruminococcus bromii | This patent | tuf |
| 1684 | Paracoccidioides brasiliensis | This patent | atpD |
| 1685 | Candida norvegica | This patent | tuf (EF-1) |
| 1686 | Aspergillus nidulans | This patent | tuf |
| 1687 | Aspergillus terreus | This patent | tuf |
| 1688 | Candida norvegica | This patent | tuf |
| 1689 | Candida parapsilosis | This patent | tuf |
| 1702 | Streptococcus gordonii | WO98/20157 | recA |
| 1703 | Streptococcus mutans | WO98/20157 | recA |
| 1704 | Streptococcus pneumoniae | WO98/20157 | recA |
| 1705 | Streptococcus pyogenes | WO98/20157 | recA |
| 1706 | Streptococcus salivarius subsp. thermophilus | WO98/20157 | recA |
| 1707 | Escherichia coli | WO98/20157 | oxa |
| 1708 | Enterococcus faecalis | WO98/20157 | blaZ |
| 1709 | Pseudomonas aeruginosa | WO98/20157 | aac6′-IIa |
| 1710 | Staphylococcus aureus | WO98/20157 | ermA |
| 1711 | Escherichia coli | WO98/20157 | ermB |
| 1712 | Staphylococcus aureus | WO98/20157 | ermC |
| 1713 | Enterococcus faecalis | WO98/20157 | vanB |
| 1714 | Campylobacter jejuni subsp. jejuni | This patent | recA |
| 1715 | Abiotrophia adiacens | WO98/20157 | tuf |
| 1716 | Abiotrophia defectiva | WO98/20157 | tuf |
| 1717 | Corynebacterium accolens | WO98/20157 | tuf |
| 1718 | Corynebacterium genitalium | WO98/20157 | tuf |
| 1719 | Corynebacterium jeikeium | WO98/20157 | tuf |
| 1720 | Corynebacterium pseudodiphtheriticum | WO98/20157 | tuf |
| 1721 | Corynebacterium striatum | WO98/20157 | tuf |
| 1722 | Enterococcus avium | WO98/20157 | tuf |
| 1723 | Gardnerella vaginalis | WO98/20157 | tuf |
| 1724 | Listeria innocua | WO98/20157 | tuf |
| 1725 | Listeria ivanovii | WO98/20157 | tuf |
| 1726 | Listeria monocytogenes | WO98/20157 | tuf |
| 1727 | Listeria seeligeri | WO98/20157 | tuf |
| 1728 | Staphylococcus aureus | WO98/20157 | tuf |
| 1729 | Staphylococcus saprophyticus | WO98/20157 | tuf |
| 1730 | Staphylococcus simulans | WO98/20157 | tuf |
| 1731 | Streptococcus agalactiae | WO98/20157 | tuf |
| 1732 | Streptococcus pneumoniae | WO98/20157 | tuf |
| 1733 | Streptococcus salivarius | WO98/20157 | tuf |
| 1734 | Agrobacterium radiobacter | WO98/20157 | tuf |
| 1735 | Bacillus subtilis | WO98/20157 | tuf |
| 1736 | Bacteroides fragilis | WO98/20157 | tuf |
| 1737 | Borrelia burgdorferi | WO98/20157 | tuf |
| 1738 | Brevibacterium linens | WO98/20157 | tuf |
| 1739 | Chlamydia trachomatis | WO98/20157 | tuf |
| 1740 | Fibrobacter succinogenes | WO98/20157 | tuf |
| 1741 | Flavobacterium ferrugineum | WO98/20157 | tuf |
| 1742 | Helicobacter pylori | WO98/20157 | tuf |
| 1743 | Micrococcus luteus | WO98/20157 | tuf |
| 1744 | Mycobacterium tuberculosis | WO98/20157 | tuf |
| 1745 | Mycoplasma genitalium | WO98/20157 | tuf |
| 1746 | Neisseria gonorrhoeae | WO98/20157 | tuf |
| 1747 | Rickettsia prowazekii | WO98/20157 | tuf |
| 1748 | Salmonella choleraesuis subsp. choleraesuis | WO98/20157 | tuf |
| | serotype Typhimurium | | |
| 1749 | Shewanella putrefaciens | WO98/20157 | tuf |
| 1750 | Stigmatella aurantiaca | WO98/20157 | tuf |
| 1751 | Thiomonas cuprina | WO98/20157 | tuf |
| 1752 | Treponema pallidum | WO98/20157 | tuf |
| 1753 | Ureaplasma urealyticum | WO98/20157 | tuf |
| 1754 | Wolinella succinogenes | WO98/20157 | tuf |
| 1755 | Burkholderia cepacia | WO98/20157 | tuf |
| 1756 | Bacillus anthracis | This patent | recA |
| 1757 | Bacillus anthracis | This patent | recA |
| 1758 | Bacillus cereus | This patent | recA |
| 1759 | Bacillus cereus | This patent | recA |
| 1760 | Bacillus mycoides | This patent | recA |
| 1761 | Bacillus pseudomycoides | This patent | recA |
| 1762 | Bacillus thuringiensis | This patent | recA |
| 1763 | Bacillus thuringiensis | This patent | recA |
| 1764 | Klebsiella oxytoca | This patent | gyrA |
| 1765 | Klebsiella pneumoniae subsp. ozaenae | This patent | gyrA |
| 1766 | Klebsiella planticola | This patent | gyrA |
| 1767 | Klebsiella pneumoniae | This patent | gyrA |
| 1768 | Klebsiella pneumoniae subsp. pneumoniae | This patent | gyrA |
| 1769 | Klebsiella pneumoniae subsp. pneumoniae | This patent | gyrA |
| 1770 | Klebsiella pneumoniae subsp. rhinoscleromatis | This patent | gyrA |
| 1771 | Klebsiella terrigena | This patent | gyrA |
| 1772 | Legionella pneumophila subsp. pneumophila | This patent | gyrA |
| 1773 | Proteus mirabilis | This patent | gyrA |
| 1774 | Providencia rettgeri | This patent | gyrA |
| 1775 | Proteus vulgaris | This patent | gyrA |
| 1776 | Yersinia enterocolitica | This patent | gyrA |
| 1777 | Klebsiella oxytoca | This patent | parC (grlA) |
| 1778 | Klebsiella oxytoca | This patent | parC (grlA) |
| 1779 | Klebsiella pneumoniae subsp. ozaenae | This patent | parC (grlA) |
| 1780 | Klebsiella planticola | This patent | parC (grlA) |
| 1781 | Klebsiella pneumoniae | This patent | parC (grlA) |
| 1782 | Klebsiella pneumoniae subsp. pneumoniae | This patent | parC (grlA) |
| 1783 | Klebsiella pneumoniae subsp. pneumoniae | This patent | parC (grlA) |
| 1784 | Klebsiella pneumoniae subsp. rhinoscleromatis | This patent | parC (grlA) |
| 1785 | Klebsiella terrigena | This patent | parC (grlA) |
| 1786 | Bacillus cereus | This patent | fusA |
| 1787 | Bacillus cereus | This patent | fusA |
| 1788 | Bacillus anthracis | This patent | fusA |
| 1789 | Bacillus cereus | This patent | fusA |
| 1790 | Bacillus anthracis | This patent | fusA |
| 1791 | Bacillus pseudomycoides | This patent | fusA |
| 1792 | Bacillus cereus | This patent | fusA |
| 1793 | Bacillus anthracis | This patent | fusA |
| 1794 | Bacillus cereus | This patent | fusA |
| 1795 | Bacillus weihenstephanensis | This patent | fusA |
| 1796 | Bacillus mycoides | This patent | fusA |
| 1797 | Bacillus thuringiensis | This patent | fusA |
| 1798 | Bacillus weihenstephanensis | This patent | fusA-tuf spacer |
| 1799 | Bacillus thuringiensis | This patent | fusA-tuf spacer |
| 1800 | Bacillus anthracis | This patent | fusA-tuf spacer |
| 1801 | Bacillus pseudomycoides | This patent | fusA-tuf spacer |
| 1802 | Bacillus anthracis | This patent | fusA-tuf spacer |
| 1803 | Bacillus cereus | This patent | fusA-tuf spacer |
| 1804 | Bacillus cereus | This patent | fusA-tuf spacer |
| 1805 | Bacillus mycoides | This patent | fusA-tuf spacer |
| 1806 | Bacillus cereus | This patent | fusA-tuf spacer |
| 1807 | Bacillus cereus | This patent | fusA-tuf spacer |
| 1808 | Bacillus cereus | This patent | fusA-tuf spacer |
| 1809 | Bacillus anthracis | This patent | fusA-tuf spacer |
| 1810 | Bacillus mycoides | This patent | tuf |
| 1811 | Bacillus thuringiensis | This patent | tuf |
| 1812 | Bacillus cereus | This patent | tuf |
| 1813 | Bacillus weihenstephanensis | This patent | tuf |
| 1814 | Bacillus anthracis | This patent | tuf |
| 1815 | Bacillus cereus | This patent | tuf |
| 1816 | Bacillus cereus | This patent | tuf |
| 1817 | Bacillus anthracis | This patent | tuf |
| 1818 | Bacillus cereus | This patent | tuf |
| 1819 | Bacillus anthracis | This patent | tuf |
| 1820 | Bacillus pseudomycoides | This patent | tuf |
| 1821 | Bacillus cereus | This patent | tuf |
| 1822 | Streptococcus oralis | This patent | fusA |
| 1823 | Budvicia aquatica | This patent | fusA |
| 1824 | Buttiauxella agrestis | This patent | fusA |
| 1825 | Klebsiella oxytoca | This patent | fusA |
| 1826 | Plesiomonas shigelloides | This patent | fusA |
| 1827 | Shewanella putrefaciens | This patent | fusA |
| 1828 | Obesumbacterium proteus | This patent | fusA |
| 1829 | Klebsiella oxytoca | This patent | fusA-tuf spacer |
| 1830 | Budvicia aquatica | This patent | fusA-tuf spacer |
| 1831 | Plesiomonas shigelloides | This patent | fusA-tuf spacer |
| 1832 | Obesumbacterium proteus | This patent | fusA-tuf spacer |
| 1833 | Shewanella putrefaciens | This patent | fusA-tuf spacer |
| 1834 | Buttiauxella agrestis | This patent | fusA-tuf spacer |
| 1835 | Campylobacter coli | This patent | tuf |
| 1836 | Campylobacter fetus subsp. fetus | This patent | tuf |
| 1837 | Campylobacter fetus subsp. venerealis | This patent | tuf |
| 1838 | Buttiauxella agrestis | This patent | tuf |
| 1839 | Klebsiella oxytoca | This patent | tuf |
| 1840 | Plesiomonas shigelloides | This patent | tuf |
| 1841 | Shewanella putrefaciens | This patent | tuf |
| 1842 | Obesumbacterium proteus | This patent | tuf |
| 1843 | Budvicia aquatica | This patent | tuf |
| 1844 | Abiotrophia adiacens | This patent | atpD |
| 1845 | Arcanobacterium haemolyticum | This patent | atpD |
| 1846 | Basidiobolus ranarum | This patent | atpD |
| 1847 | Blastomyces dermatitidis | This patent | atpD |
| 1848 | Blastomyces dermatitidis | This patent | atpD |
| 1849 | Campylobacter coli | This patent | atpD |
| 1850 | Campylobacter fetus subsp. fetus | This patent | atpD |
| 1851 | Campylobacter fetus subsp. venerealis | This patent | atpD |
| 1852 | Campylobacter gracilis | This patent | atpD |
| 1853 | Campylobacter jejuni subsp. jejuni | This patent | atpD |
| 1854 | Enterococcus cecorum | This patent | atpD |
| 1855 | Enterococcus columbae | This patent | atpD |
| 1856 | Enterococcus dispar | This patent | atpD |
| 1857 | Enterococcus malodoratus | This patent | atpD |
| 1858 | Enterococcus mundtii | This patent | atpD |
| 1859 | Enterococcus raffinosus | This patent | atpD |
| 1860 | Globicatella sanguis | This patent | atpD |
| 1861 | Lactococcus garvieae | This patent | atpD |
| 1862 | Lactococcus lactis | This patent | atpD |
| 1863 | Listeria ivanovii | This patent | atpD |
| 1864 | Succinivibrio dextrinosolvens | This patent | atpD |
| 1865 | Tetragenococcus halophilus | This patent | atpD |
| 1866 | Campylobacter fetus subsp. fetus | This patent | recA |
| 1867 | Campylobacter fetus subsp. venerealis | This patent | recA |
| 1868 | Campylobacter jejuni subsp. jejuni | This patent | recA |
| 1869 | Enterococcus avium | This patent | recA |
| 1870 | Enterococcus faecium | This patent | recA |
| 1871 | Listeria monocytogenes | This patent | recA |
| 1872 | Streptococcus mitis | This patent | recA |
| 1873 | Streptococcus oralis | This patent | recA |
| 1874 | Aspergillus fumigatus | This patent | tuf (M) |
| 1875 | Aspergillus versicolor | This patent | tuf (M) |
| 1876 | Basidiobolus ranarum | This patent | tuf (M) |
| 1877 | Campylobacter gracilis | This patent | tuf |
| 1878 | Campylobacter jejuni subsp. jejuni | This patent | tuf |
| 1879 | Coccidioides immitis | This patent | tuf (M) |
| 1880 | Erwinia amylovora | This patent | tuf |
| 1881 | Salmonella choleraesuis subsp. choleraesuis serotype | This patent | tuf |
| | Typhimurium | | |
| 1899 | Klebsiella pneumoniae | Database | blaSHV |
| 1900 | Klebsiella pneumoniae | Database | blaSHV |
| 1901 | Escherichia coli | Database | blaSHV |
| 1902 | Klebsiella pneumoniae | Database | blaSHV |
| 1903 | Klebsiella pneumoniae | Database | blaSHV |
| 1904 | Escherichia coli | Database | blaSHV |
| 1905 | Pseudomonas aeruginosa | Database | blaSHV |
| 1927 | Neisseria meningitidis | Database | blaTEM |
| 1928 | Escherichia coli | Database | blaTEM |
| 1929 | Klebsiella oxytoca | Database | blaTEM |
| 1930 | Escherichia coli | Database | blaTEM |
| 1931 | Escherichia coli | Database | blaTEM |
| 1932 | Escherichia coli | Database | blaTEM |
| 1933 | Escherichia coli | Database | blaTEM |
| 1954 | Klebsiella pneumoniae subsp. pneumoniae | Database | gyrA |
| 1956 | Candida inconspicua | This patent | tuf (M) |
| 1957 | Candida utilis | This patent | tuf (M) |
| 1958 | Candida zeylanoides | This patent | tuf (M) |
| 1959 | Candida catenulata | This patent | tuf (M) |
| 1960 | Candida krusei | This patent | tuf (M) |
| 1965 | Plasmid pGS05 | Database | sulII |
| 1970 | Transposon Tn10 | Database | tetB |
| 1985 | Cryptococcus neoformans | Database | tuf (EF-1) |
| 1986 | Cryptococcus neoformans | Database | tuf (EF-1) |
| 1987 | Saccharomyces cerevisiae | Database | tuf (EF-1) |
| 1988 | Saccharomyces cerevisiae | Database | tuf (EF-1) |
| 1989 | Eremothecium gossypii | Database | tuf (EF-1) |
| 1990 | Eremothecium gossypii | Database | tuf (EF-1) |
| 1991 | Aspergillus oryzae | Database | tuf (EF-1) |
| 1992 | Aureobasidium pullulans | Database | tuf (EF-1) |
| 1993 | Histoplasma capsulatum | Database | tuf (EF-1) |
| 1994 | Neurospora crassa | Database | tuf (EF-1) |
| 1995 | Podospora anserina | Database | tuf (EF-1) |
| 1996 | Podospora curvicolla | Database | tuf (EF-1) |
| 1997 | Sordaria macrospora | Database | tuf (EF-1) |
| 1998 | Trichoderma reesei | Database | tuf (EF-1) |
| 2004 | Candida albicans | Database | tuf (M) |
| 2005 | Schizosaccharomyces pombe | Database | tuf (M) |
| 2010 | Klebsiella pneumoniae | Database | blaTEM |
| 2011 | Klebsiella pneumoniae | Database | blaTEM |
| 2013 | Kluyvera ascorbata | This patent | gyrA |
| 2014 | Klvyvera georgiana | This patent | gyrA |
| 2047 | Streptococcus pneumoniae | Database | pbp1A |
| 2048 | Streptococcus pneumoniae | Database | pbp1A |
| 2049 | Streptococcus pneumoniae | Database | pbp1A |
| 2050 | Streptococcus pneumoniae | Database | pbp1A |
| 2051 | Streptococcus pneumoniae | Database | pbp1A |
| 2052 | Streptococcus pneumoniae | Database | pbp1A |
| 2053 | Streptococcus pneumoniae | Database | pbp1A |
| 2054 | Streptococcus pneumoniae | Database | gyrA |
| 2055 | Streptococcus pneumoniae | Database | parC |
| 2056 | Streptococcus pneumoniae | This patent | pbp1A |
| 2057 | Streptococcus pneumoniae | This patent | pbp1A |
| 2058 | Streptococcus pneumoniae | This patent | pbp1A |
| 2059 | Streptococcus pneumoniae | This patent | pbp1A |
| 2060 | Streptococcus pneumoniae | This patent | pbp1A |
| 2061 | Streptococcus pneumoniae | This patent | pbp1A |
| 2062 | Streptococcus pneumoniae | This patent | pbp1A |
| 2063 | Streptococcus pneumoniae | This patent | pbp1A |
| 2064 | Streptococcus pneumoniae | This patent | pbp1A |
| 2072 | Mycobacterium tuberculosis | Database | rpoB |
| 2097 | Mycoplasma pneumoniae | Database | tuf |
| 2101 | Mycobacterium tuberculosis | Database | inhA |
| 2105 | Mycobacterium tuberculosis | Database | embB |
| 2129 | Clostridium difficile | Database | cdtA |
| 2130 | Clostridium difficile | Database | cdtB |
| 2137 | Pseudomonas putida | Genome project | tuf |
| 2138 | Pseudomonas aeruginosa | Genome project | tuf |
| 2139 | Campylobacter jejuni | Database | atpD |
| 2140 | Streptococcus pneumoniae | Database | pbp1a |
| 2144 | Staphylococcus aureus | Database | mupA |
| 2147 | Escherichia coli | Database | catI |
| 2150 | Escherichia coli | Database | catII |
| 2153 | Shigella flexneri | Database | catIII |
| 2156 | Clostridium perfringens | Database | catP |
| 2159 | Staphylococcus aureus | Database | cat |
| 2162 | Staphylococcus aureus | Database | cat |
| 2165 | Salmonella typhimurium | Database | ppflo-like |
| 2183 | Alcaligenes faecalis subsp. faecalis | This patent | tuf |
| 2184 | Campylobacter coli | This patent | fusA |
| 2185 | Succinivibrio dextrinosolvens | This patent | tuf |
| 2186 | Tetragenococcus halophilus | This patent | tuf |
| 2187 | Campylobacter jejuni subsp. jejuni | This patent | fusA |
| 2188 | Campylobacter jejuni subsp. jejuni | This patent | fusA |
| 2189 | Leishmania guyanensis | This patent | atpD |
| 2190 | Trypanosoma brucei brucei | This patent | atpD |
| 2191 | Aspergillus nidulans | This patent | atpD |
| 2192 | Leishmania panamensis | This patent | atpD |
| 2193 | Aspergillus nidulans | This patent | tuf (M) |
| 2194 | Aureobasidium pullulans | This patent | tuf (M) |
| 2195 | Emmonsia parva | This patent | tuf (M) |
| 2196 | Exserohilum rostratum | This patent | tuf (M) |
| 2197 | Fusarium moniliforme | This patent | tuf (M) |
| 2198 | Fusarium solani | This patent | tuf (M) |
| 2199 | Histoplasma capsulatum | This patent | tuf (M) |
| 2200 | Kocuria kristinae | This patent | tuf |
| 2201 | Vibrio mimicus | This patent | tuf |
| 2202 | Citrobacter freundii | This patent | recA |
| 2203 | Clostridium botulinum | This patent | recA |
| 2204 | Francisella tularensis | This patent | recA |
| 2205 | Peptostreptococcus anaerobius | This patent | recA |
| 2206 | Peptostreptococcus asaccharolyticus | This patent | recA |
| 2207 | Providencia stuartii | This patent | recA |
| 2208 | Salmonella choleraesuis subsp. choleraesuis | This patent | recA |
| | serotype Paratyphi A | | |
| 2209 | Salmonella choleraesuis subsp. choleraesuis | This patent | recA |
| | serotype Typhimurium | | |
| 2210 | Staphylococcus saprophyticus | This patent | recA |
| 2211 | Yersinia pseudotuberculosis | This patent | recA |
| 2212 | Zoogloea ramigera | This patent | recA |
| 2214 | Abiotrophia adiacens | This patent | fusA |
| 2215 | Acinetobacter baumannii | This patent | fusA |
| 2216 | Actinomyces meyeri | This patent | fusA |
| 2217 | Clostridium difficile | This patent | fusA |
| 2218 | Corynebacterium diphtheriae | This patent | fusA |
| 2219 | Enterobacter cloacae | This patent | fusA |
| 2220 | Klebsiella pneumoniae subsp. pneumoniae | This patent | fusA |
| 2221 | Listeria monocytogenes | This patent | fusA |
| 2222 | Mycobacterium avium | This patent | fusA |
| 2223 | Mycobacterium gordonae | This patent | fusA |
| 2224 | Mycobacterium kansasii | This patent | fusA |
| 2225 | Mycobacterium terrae | This patent | fusA |
| 2226 | Neisseria polysaccharea | This patent | fusA |
| 2227 | Staphylococcus epidermidis | This patent | fusA |
| 2228 | Staphylococcus haemolyticus | This patent | fusA |
| 2229 | Succinivibrio dextrinosolvens | This patent | fusA |
| 2230 | Tetragenococcus halophilus | This patent | fusA |
| 2231 | Veillonella parvula | This patent | fusA |
| 2232 | Yersinia pseudotuberculosis | This patent | fusA |
| 2233 | Zoogloea ramigera | This patent | fusA |
| 2234 | Aeromonas hydrophila | This patent | fusA |
| 2235 | Abiotrophia adiacens | This patent | fusA-tuf spacer |
| 2236 | Acinetobacter baumannii | This patent | fusA-tuf spacer |
| 2237 | Actinomyces meyeri | This patent | fusA-tuf spacer |
| 2238 | Clostridium difficile | This patent | fusA-tuf spacer |
| 2239 | Corynebacterium diphtheriae | This patent | fusA-tuf spacer |
| 2240 | Enterobacter cloacae | This patent | fusA-tuf spacer |
| 2241 | Klebsiella pneumoniae subsp. pneumoniae | This patent | fusA-tuf spacer |
| 2242 | Listeria monocytogenes | This patent | fusA-tuf spacer |
| 2243 | Mycobacterium avium | This patent | fusA-tuf spacer |
| 2244 | Mycobacterium gordonae | This patent | fusA-tuf spacer |
| 2245 | Mycobacterium kansasii | This patent | fusA-tuf spacer |
| 2246 | Mycobacterium terrae | This patent | fusA-tuf spacer |
| 2247 | Neisseria polysaccharea | This patent | fusA-tuf spacer |
| 2248 | Staphylococcus epidermidis | This patent | fusA-tuf spacer |
| 2249 | Staphylococcus haemolyticus | This patent | fusA-tuf spacer |
| 2255 | Abiotrophia adiacens | This patent | tuf |
| 2256 | Acinetobacter baumannii | This patent | tuf |
| 2257 | Actinomyces meyeri | This patent | tuf |
| 2258 | Clostridium difficile | This patent | tuf |
| 2259 | Corynebacterium diphtheriae | This patent | tuf |
| 2260 | Enterobacter cloacae | This patent | tuf |
| 2261 | Klebsiella pneumoniae subsp. pneumoniae | This patent | tuf |
| 2262 | Listeria monocytogenes | This patent | tuf |
| 2263 | Mycobacterium avium | This patent | tuf |
| 2264 | Mycobacterium gordonae | This patent | tuf |
| 2265 | Mycobacterium kansasii | This patent | tuf |
| 2266 | Mycobacterium terrae | This patent | tuf |
| 2267 | Neisseria polysaccharea | This patent | tuf |
| 2268 | Staphylococcus epidermidis | This patent | tuf |
| 2269 | Staphylococcus haemolyticus | This patent | tuf |
| 2270 | Aeromonas hydrophila | This patent | tuf |
| 2271 | Bilophila wadsworthia | This patent | tuf |
| 2272 | Brevundimonas diminuta | This patent | tuf |
| 2273 | Streptococcus mitis | This patent | pbp1a |
| 2274 | Streptococcus mitis | This patent | pbp1a |
| 2275 | Streptococcus mitis | This patent | pbp1a |
| 2276 | Streptococcus oralis | This patent | pbp1a |
| 2277 | Escherichia coli | This patent | gyrA |
| 2278 | Escherichia coli | This patent | gyrA |
| 2279 | Escherichia coli | This patent | gyrA |
| 2280 | Escherichia coli | This patent | gyrA |
| 2288 | Enterococcus faecium | Database | ddI |
| 2293 | Enterococcus faecium | Database | vanA |
| 2296 | Enterococcus faecalis | Database | vanB |

*tuf indicates tuf sequences, tuf (C) indicates tuf sequences divergent from main (usually A and B) copies of the elongation factor-Tu, tuf (EF-1) indicates tuf sequences of the eukaryotic type (elongation factor 1α), tuf (M) indicates tuf sequences from organellar (mostly mitochondrial) origin. fusA indicates fusA sequences; fusA-tuf spacer indicates the intergenic region between fusA and tuf. atpD indicates atpD sequences ot the F-type, atpD (V) indicates atpD sequences of the V-type. recA indicates recA sequences, recA(Rad51) indicates rad51 sequences or homologs and recA(Dmc1) indicates dmc1 sequences or homologs.

TABLE 8
Bacterial species used to test the specificity of the Streptococcus
agalactiae-specific amplification primers derived from tuf sequences.

| Strain | Reference number |
|---|---|
| Streptococcus acidominimus | ATCC 51726 |
| Streptococcus agalactiae | ATCC 12403 |
| Streptococcus agalactiae | ATCC 12973 |
| Streptococcus agalactiae | ATCC 13813 |
| Streptococcus agalactiae | ATCC 27591 |
| Streptococcus agalactiae | CDCs 1073 |
| Streptococcus anginosus | ATCC 27335 |
| Streptococcus anginosus | ATCC 33397 |
| Streptococcus bovis | ATCC 33317 |
| Streptococcus anginosus | ATCC 27823 |
| Streptococcus cricetus | ATCC 19642 |
| Streptococcus cristatus | ATCC 51100 |
| Streptococcus downei | ATCC 33748 |
| Streptococcus dysgalactiae | ATCC 43078 |
| Streptococcus equi subsp. equi | ATCC 9528 |
| Streptococcus ferus | ATCC 33477 |
| Streptococcus gordonii | ATCC 10558 |
| Streptococcus macacae | ATCC 35911 |
| Streptococcus mitis | ATCC 49456 |
| Streptococcus mutans | ATCC 25175 |
| Streptococcus oralis | ATCC 35037 |
| Streptococcus parasanguinis | ATCC 15912 |
| Streptococcus parauberis | DSM 6631 |
| Streptococcus pneumoniae | ATCC 27336 |
| Streptococcus pyogenes | ATCC 19615 |
| Streptococcus ratti | ATCC 19645 |
| Streptococcus salivarius | ATCC 7073 |
| Streptococcus sanguinis | ATCC 10556 |
| Streptococcus sobrinus | ATCC 27352 |
| Streptococcus suis | ATCC 43765 |
| Streptococcus uberis | ATCC 19436 |
| Streptococcus vestubularis | ATCC 49124 |
| Bacteroides caccae | ATCC 43185 |
| Bacteroides vulgatus | ATCC 8482 |
| Bacteroides fragilis | ATCC 25285 |
| Candida albicans | ATCC 11006 |
| Clostridium innoculum | ATCC 14501 |
| Clostridium ramosum | ATCC 25582 |
| Lactobacillus casei subsp. casei | ATCC 393 |
| Clostridium septicum | ATCC 12464 |
| Corynebacterium cervicis | NCTC 10604 |
| Corynebacterium genitalium | ATCC 33031 |
| Corynebacterium urealyticum | ATCC 43042 |
| Enterococcus faecalis | ATCC 29212 |
| Enterococcus faecium | ATCC 19434 |
| Eubacterium lentum | ATCC 43055 |
| Eubacterium nodutum | ATCC 33099 |
| Gardnerella vaginalis | ATCC 14018 |
| Lactobacillus acidophilus | ATCC 4356 |
| Lactobacillus crispatus | ATCC 33820 |
| Lactobacillus gasseri | ATCC 33323 |
| Lactobacillus johnsonii | ATCC 33200 |
| Lactococcus lactis subsp. lactis | ATCC 19435 |
| Lactococcus lactis subsp. lactis | ATCC 11454 |
| Listeria innocua | ATCC 33090 |
| Micrococcus luteus | ATCC 9341 |
| Escherichia coli | ATCC 25922 |
| Micrococcus lylae | ATCC 27566 |
| Porphyromonas asaccharolytica | ATCC 25260 |
| Prevotella corporis | ATCC 33547 |
| Prevotella melanogenica | ATCC 25845 |
| Staphylococcus aureus | ATCC 13301 |
| Staphylococcus epidermidis | ATCC 14990 |
| Staphylococcus saprophyticus | ATCC 15305 |

TABLE 9
Bacterial species used to test the specificity of the Streptococcus
agalactiae-specific amplification primers derived from atpD sequences.

| Strain | Reference number |
|---|---|
| Streptococcus acidominimus | ATCC 51726 |
| Streptococcus agalactiae | ATCC 12400 |
| Streptococcus agalactiae | ATCC 12403 |
| Streptococcus agalactiae | ATCC 12973 |
| Streptococcus agalactiae | ATCC 13813 |
| Streptococcus agalactiae | ATCC 27591 |
| Streptococcus agalactiae | CDCs-1073 |
| Streptococcus anginosus | ATCC 27335 |
| Streptococcus anginosus | ATCC 27823 |
| Streptococcus bovis | ATCC 33317 |
| Streptococcus cricetus | ATCC 19642 |
| Streptococcus cristatus | ATCC 51100 |
| Streptococcus downei | ATCC 33748 |
| Streptococcus dysgalactiae | ATCC 43078 |
| Streptococcus equi subsp. equi | ATCC 9528 |
| Streptococcus ferus | ATCC 33477 |
| Streptococcus gordonii | ATCC 10558 |
| Streptococcus macacae | ATCC 35911 |
| Streptococcus mitis | ATCC 49456 |
| Streptococcus mutans | ATCC 25175 |
| Streptococcus oralis | ATCC 35037 |
| Streptococcus parasanguinis | ATCC 15912 |
| Streptococcus parauberis | DSM 6631 |
| Streptococcus pneumoniae | ATCC 27336 |
| Streptococcus pyogenes | ATCC 19615 |
| Streptococcus ratti | ATCC 19645 |
| Streptococcus salivarius | ATCC 7073 |
| Streptococcus sanguinis | ATCC 10556 |
| Streptococcus sobrinus | ATCC 27352 |
| Streptococcus suis | ATCC 43765 |
| Streptococcus uberis | ATCC 19436 |
| Streptococcus vestibularis | ATCC 49124 |

TABLE 10
Bacterial species used to test the specificity of the Enterococcus-
specific amplification primers derived from tuf sequences.

| | |
|---|---|
| Strain | Reference number |

Gram-positive species (n = 74)

| | |
|---|---|
| Abiotrophia adiacens | ATCC 49176 |
| Abiotrophia defectiva | ATCC 49175 |
| Bacillus cereus | ATCC 14579 |
| Bacillus subtilis | ATCC 27370 |
| Bifidobacterium adolescentis | ATCC 27534 |
| Bifidobacterium breve | ATCC 15700 |
| Bifidobacterium dentium | ATCC 27534 |
| Bifidobacterium longum | ATCC 15707 |
| Clostridium perfringens | ATCC 3124 |
| Clostridium septicum | ATCC 12464 |
| Corynebacterium aquaticus | ATCC 14665 |
| Corynebacterium | ATCC 10700 |
| pseudodiphtheriticum | |
| Enterococcus avium | ATCC 14025 |
| Enterococcus casseliflavus | ATCC 25788 |
| Enterococcus cecorum | ATCC 43199 |
| Enterococcus columbae | ATCC 51263 |
| Enterococcus dispar | ATCC 51266 |
| Enterococcus durans | ATCC 19432 |
| Enterococcus faecalis | ATCC 29212 |
| Enterococcus faecium | ATCC 19434 |
| Enterococcus flavescens | ATCC 49996 |
| Enterococcus gallinarum | ATCC 49573 |
| Enterococcus hirae | ATCC 8044 |
| Enterococcus malodoratus | ATCC 43197 |
| Enterococcus mundtii | ATCC 43186 |
| Enterococcus pseudoavium | ATCC 49372 |
| Enterococcus raffinosus | ATCC 49427 |
| Enterococcus saccharolyticus | ATCC 43076 |
| Enterococcus solitarius | ATCC 49428 |
| Enterococcus sulfureus | ATCC 49903 |
| Eubacterium lentum | ATCC 49903 |
| Gemella haemolysans | ATCC 10379 |
| Gemella morbillorum | ATCC 27842 |
| Lactobacillus acidophilus | ATCC 4356 |
| Leuconostoc mesenteroides | ATCC 19225 |
| Listeria grayi | ATCC 19120 |
| Listeria grayi | ATCC 19123 |
| Listeria innocua | ATCC 33090 |
| Listeria ivanovii | ATCC 19119 |
| Listeria monocytogenes | ATCC 15313 |
| Listeria seeligeri | ATCC 35967 |
| Micrococcus luteus | ATCC 9341 |
| Pediococcus acidilacti | ATCC 33314 |
| Pediococcus pentosaceus | ATCC 33316 |
| Peptococcus niger | ATCC 27731 |
| Peptostreptococcus anaerobius | ATCC 27337 |
| Peptostreptococcus indolicus | ATCC 29247 |
| Peptostreptococcus micros | ATCC 33270 |
| Propionibacterium acnes | ATCC 6919 |
| Staphylococcus aureus | ATCC 43300 |
| Staphylococcus capitis | ATCC 27840 |
| Staphylococcus epidermidis | ATCC 14990 |
| Staphylococcus haemolyticus | ATCC 29970 |
| Staphylococcus hominis | ATCC 27844 |
| Staphylococcus lugdunensis | ATCC 43809 |
| Staphylococcus saprophyticus | ATCC 15305 |
| Staphylococcus simulans | ATCC 27848 |
| Staphylococcus warneri | ATCC 27836 |
| Streptococcus agalactiae | ATCC 13813 |
| Streptococcus anginosus | ATCC 33397 |
| Streptococcus bovis | ATCC 33317 |
| Streptococcus constellatus | ATCC 27823 |
| Streptococcus cristatus | ATCC 51100 |
| Streptococcus intermedius | ATCC 27335 |
| Streptococcus mitis | ATCC 49456 |
| Streptococcus mitis | ATCC 3639 |
| Streptococcus mutans | ATCC 27175 |
| Streptococcus parasanguinis | ATCC 15912 |
| Streptococcus pneumoniae | ATCC 27736 |
| Streptococcus pneumoniae | ATCC 6303 |
| Streptococcus pyogenes | ATCC 19615 |
| Streptococcus salivarius | ATCC 7073 |
| Streptococcus sanguinis | ATCC 10556 |
| Streptococcus suis | ATCC 43765 |

Gram-negative species (n = 39)

| | |
|---|---|
| Acidominococcus fermentans | ATCC 2508 |
| Acinetobacter baumannii | ATCC 19606 |
| Alcaligenes faecalis | ATCC 8750 |
| Anaerobiospirillum | ATCC 29305 |
| succiniproducens | |
| Anaerorhabdus furcosus | ATCC 25662 |
| Bacteroides distasonis | ATCC 8503 |
| Bacteroides thetaiotaomicron | ATCC 29741 |
| Bacteroides vulgatus | ATCC 8482 |
| Bordetella pertussis | LSPQ 3702 |
| Bulkholderia cepacia | LSPQ 2217 |
| Butyvibrio fibrinosolvens | ATCC 19171 |
| Cardiobacterium hominis | ATCC 15826 |
| Citrobacter freundii | ATCC 8090 |
| Desulfovibrio vulgaris | ATCC 29579 |
| Edwardsiellae tarda | ATCC 15947 |
| Enterobacter cloacae | ATCC 13047 |
| Escherichia coli | ATCC 25922 |
| Fusobacterium russii | ATCC 25533 |
| Haemophilus influenzae | ATCC 9007 |
| Hafnia alvei | ATCC 13337 |
| Klebsiella oxytoca | ATCC 13182 |
| Meganomonas hypermegas | ATCC 25560 |
| Mitsukoella multiacidus | ATCC 27723 |
| Moraxella catarrhalis | ATCC 43628 |
| Morganella morganii | ATCC 25830 |
| Neisseria meningitidis | ATCC 13077 |
| Pasteurella aerogenes | ATCC 27883 |
| Proteus vulgaris | ATCC 13315 |
| Providencia alcalifaciens | ATCC 9886 |
| Providencia rettgeri | ATCC 9250 |
| Pseudomonas aeruginosa | ATCC 27853 |
| Salmonella typhimurium | ATCC 14028 |
| Serratia marcescens | ATCC 13880 |
| Shigella flexneri | ATCC 12022 |
| Shigella sonnei | ATCC 29930 |
| Succinivibrio dextrinosolvens | ATCC 19716 |
| Tissierella praeacuta | ATCC 25539 |
| Veillonella parvuala | ATCC 10790 |
| Yersinia enterocolitica | ATCC 9610 |

TABLE 11
Microbial species for which tuf and/or atpD and/or recA sequences are available in public
databases.

| | | | |
|---|---|---|---|
| Species | Strain | Accession number | Coding gene* |

tuf sequences

| | | | |
|---|---|---|---|
| Bacteria | | | |
| Actinobacillus actinomycetemcomitans | HK1651 | Genome project² | tuf |
| Actinobacillus actinomycetemcomitans | HK1651 | Genome project² | tuf (EF-G) |
| Agrobacterium tumefaciens | | X99673 | tuf |
| Agrobacterium tumefaciens | | X99673 | tuf (EF-G) |
| Agrobacterium tumefaciens | | X99674 | tuf |
| Anacystis nidulans | PCC 6301 | X17442 | tuf |
| Aquifex aeolicus | VF5 | AE000669 | tuf |
| Aquifex aeolicus | VF5 | AE000669 | tuf (EF-G) |
| Aquifex pyrophilus | | Genome project² | tuf (EF-G) |
| Aquifex pyrophilus | | Y15787 | tuf |
| Bacillus anthracis | Ames | Genome project² | tuf |
| Bacillus anthracis | Ames | Genome project² | tuf (EF-G) |
| Bacillus halodurans | C-125 | AB017508 | tuf |
| Bacillus halodurans | C-125 | AB017508 | tuf (EF-G) |
| Bacillus stearothermophilus | CCM 2184 | AJ000260 | tuf |
| Bacillus subtilis | 168 | D64127 | tuf |
| Bacillus subtilis | 168 | D64127 | tuf (EF-G) |
| Bacillus subtilis | DSM 10 | Z99104 | tuf |
| Bacillus subtilis | DSM 10 | Z99104 | tuf (EF-G) |
| Bacteroides forsythus | ATCC 43037 | AB035466 | tuf |
| Bacteroides fragilis | DSM 1151 | —¹ | tuf |
| Bordetella bronchiseptica | RB50 | Genome project² | tuf |
| Bordetella pertussis | Tohama 1 | Genome project² | tuf |
| Bordetella pertussis | Tohama 1 | Genome project² | tuf (EF-G) |
| Borrelia burdorgferi | B31 | U78193 | tuf |
| Borrelia burgdorferi | | AE001155 | tuf (EF-G) |
| Brevibacterium linens | DSM 20425 | X76863 | tuf |
| Buchnera aphidicola | Ap | Y12307 | tuf |
| Burkholderia pseudomallei | K96243 | Genome project² | tuf (EF-G) |
| Campylobacter jejuni | NCTC 11168 | Y17167 | tuf |
| Campylobacter jejuni | NCTC 11168 | CJ11168X2 | tuf (EF-G) |
| Chlamydia pneumoniae | CWL029 | AE001592 | tuf |
| Chlamydia pneumoniae | CWL029 | AE001639 | tuf (EF-G) |
| Chlamydia trachomatis | | M74221 | tuf |
| Chlamydia trachomatis | D/UW-3/CX | AE001317 | tuf (EF-G) |
| Chlamydia trachomatis | D/UW-3/CX | AE001305 | tuf |
| Chlamydia trachomatis | F/IC-Cal-13 | L22216 | tuf |
| Chlorobium vibrioforme | DSM 263 | X77033 | tuf |
| Chloroflexus aurantiacus | DSM 636 | X76865 | tuf |
| Clostridium acetobutylicum | ATCC 824 | Genome project² | tuf |
| Clostridium difficile | 630 | Genome project² | tuf |
| Clostridium difficile | 630 | Genome project² | tuf (EF-G) |
| Corynebacterium diphtheriae | NCTC 13129 | Genome project² | tuf |
| Corynebacterium diphtheriae | NCTC 13129 | Genome project² | tuf (EF-G) |
| Corynebacterium glutamicum | ASO 19 | X77034 | tuf |
| Corynebacterium glutamicum | MJ-233 | E09634 | tuf |
| Coxiella burnetii | Nine Mile phase I | AF136604 | tuf |
| Cytophaga lytica | DSM 2039 | X77035 | tuf |
| Deinococcus radiodurans | R1 | AE001891 | tuf (EF-G) |
| Deinococcus radiodurans | R1 | AE180092 | tuf |
| Deinococcus radiodurans | R1 | AE002041 | tuf |
| Deinonema sp. | | —¹ | tuf |
| Eikenella corrodens | ATCC 23834 | Z12610 | tuf |
| Eikenella corrodens | ATCC 23834 | Z12610 | tuf (EF-G) |
| Enterococcus faecalis | | Genome project² | tuf (EF-G) |
| Escherichia coli | | J01690 | tuf |
| Escherichia coli | | J01717 | tuf |
| Escherichia coli | | X00415 | tuf (EF-G) |
| Escherichia coli | | X57091 | tuf |
| Escherichia coli | K-12 MG1655 | U00006 | tuf |
| Escherichia coli | K-12 MG1655 | U00096 | tuf |
| Escherichia coli | K-12 MG1655 | AE000410 | tuf (EF-G) |
| Fervidobacterium islandicum | DSM 5733 | Y15788 | tuf |
| Fibrobacter succinogenes | S85 | X76866 | tuf |
| Flavobacterium ferrigeneum | DSM 13524 | X76867 | tuf |
| Flexistipes sinusarabici | | X59461 | tuf |
| Gloeobacter violaceus | PCC 7421 | U09433 | tuf |
| Gloeothece sp. | PCC 6501 | U09434 | tuf |
| Haemophilus actinomycetemcomitans | HK1651 | Genome project² | tuf |
| Haemophilus ducreyi | 35000 | AF087414 | tuf (EF-G) |
| Haemophilus influenzae | Rd | U32739 | tuf |
| Haemophilus influenzae | Rd | U32746 | tuf |
| Haemophilus influenzae | Rd | U32739 | tuf (EF-G) |
| Helicobacter pylori | 26695 | AE000511 | tuf |
| Helicobacter pylori | J99 | AE001539 | tuf (EF-G) |
| Helicobacter pylori | J99 | AE001541 | tuf |
| Herpetosiphon aurantiacus | Hpga1 | X76868 | tuf |
| Klebsiella pneumoniae | M6H 78578 | Genome project² | tuf |
| Klebsiella pneumoniae | M6H 78578 | Genome project² | tuf (EF-G) |
| Lactobacillus paracasei | | E13922 | tuf |
| Legionella pneumophila | Philadelphia-1 | Genome project² | tuf |
| Leptospira interrogans | | AF115283 | tuf |
| Leptospira interrogans | | AF115283 | tuf (EF-G) |
| Micrococcus luteus | IFO 3333 | M17788 | tuf (EF-G) |
| Micrococcus luteus | IFO 3333 | M17788 | tuf |
| Moraxella sp. | TAC II 25 | AJ249258 | tuf |
| Mycobacterium avium | 104 | Genome project² | tuf |
| Mycobacterium avium | 104 | Genome project² | tuf (EF-G) |
| Mycobacterium bovis | AF2122/97 | Genome project² | tuf |
| Mycobacterium bovis | AF2122/97 | Genome project² | tuf (EF-G) |
| Mycobacterium leprae | | L13276 | tuf |
| Mycobacterium leprae | | Z14314 | tuf |
| Mycobacterium leprae | | Z14314 | tuf (EF-G) |
| Mycobacterium leprae | Thai 53 | D13869 | tuf |
| Mycobacterium tuberculosis | Erdmann | S40925 | tuf |
| Mycobacterium tuberculosis | H37Rv | AL021943 | tuf (EF-G) |
| Mycobacterium tuberculosis | H37Rv | Z84395 | tuf |
| Mycobacterium tuberculosis | y42 | AD000005 | tuf |
| Mycobacterium tuberculosis | CSU#93 | Genome project² | tuf |
| Mycobacterium tuberculosis | CSU#93 | Genome project² | tuf (EF-G) |
| Mycoplasma capricolum | PG-31 | X16462 | tuf |
| Mycoplasma genitalium | G37 | U39732 | tuf |
| Mycoplasma genitalium | G37 | U39689 | tuf (EF-G) |
| Mycoplasma hominis | | X57136 | tuf |
| Mycoplasma hominis | PG21 | M57675 | tuf |
| Mycoplasma pneumoniae | M129 | AE000019 | tuf |
| Mycoplasma pneumoniae | M129 | AE000058 | tuf (EF-G) |
| Neisseria gonorrhoeae | MS11 | L36380 | tuf |
| Neisseria gonorrhoeae | MS11 | L36380 | tuf (EF-G) |
| Neisseria meningitidis | Z2491 | Genome project² | tuf (EF-G) |
| Neisseria meningitidis | Z2491 | Genome project² | tuf |
| Pasteurella multocida | Pm70 | Genome project² | tuf |
| Peptococcus niger | DSM 20745 | X76869 | tuf |
| Phormidium ectocarpi | PCC 7375 | U09443 | tuf |
| Planobispora rosea | ATCC 53773 | U67308 | tuf |
| Planobispora rosea | ATCC 53733 | X98830 | tuf |
| Planobispora rosea | ATCC 53733 | X98830 | tuf (EF-G) |
| Plectonema boryanum | PCC 73110 | U09444 | tuf |
| Porphyromonas gingivalis | W83 | Genome project² | tuf |
| Porphyromonas gingivalis | W83 | Genome project² | tuf (EF-G) |
| Porphyromonas gingivalis | FDC 381 | AB035461 | tuf |
| Porphyromonas gingivalis | W83 | AB035462 | tuf |
| Porphyromonas gingivalis | SUNY 1021 | AB035463 | tuf |
| Porphyromonas gingivalis | A7A1-28 | AB035464 | tuf |
| Porphyromonas gingivalis | ATCC 33277 | AB035465 | tuf |
| Porphyromonas gingivalis | ATCC 33277 | AB035471 | tuf (EF-G) |
| Prochlorothrix hollandica | | U09445 | tuf |
| Pseudomonas aeruginosa | PAO-1 | Genome project² | tuf |
| Pseudomonas putida | | Genome project² | tuf |
| Rickettsia prowazekii | Madrid E | AJ235272 | tuf |
| Rickettsia prowazekii | Madrid E | AJ235270 | tuf (EF-G) |
| Rickettsia prowazekii | Madrid E | Z54171 | tuf (EF-G) |
| Salmonella choleraesuis subsp. | | X64591 | tuf (EF-G) |
| choleraesuis serotype Typhimurium | | | |
| Salmonella choleraesuis subsp. | LT2 trpE91 | X55116 | tuf |
| choleraesuis serotype Typhimurium | | | |
| Salmonella choleraesuis subsp. | LT2 trpE91 | X55117 | tuf |
| choleraesuis serotype Typhimurium | | | |
| Serpulina hyodysenteriae | B204 | U51635 | tuf |
| Serratia marcescens | | AF058451 | tuf |
| Shewanella putrefaciens | DSM 50426 | —¹ | tuf |
| Shewanella putrefaciens | MR-1 | Genome project² | tuf |
| Spirochaeta aurantia | DSM 1902 | X76874 | tuf |
| Staphylococcus aureus | | AJ237696 | tuf (EF-G) |
| Staphylococcus aureus | EMRSA-16 | Genome project² | tuf |
| Staphylococcus aureus | NCTC 8325 | Genome project² | tuf |
| Staphylococcus aureus | COL | Genome project² | tuf |
| Staphylococcus aureus | EMRSA-16 | Genome project² | tuf (EF-G) |
| Stigmatella aurantiaca | DW4 | X82820 | tuf |
| Stigmatella aurantiaca | Sg a1 | X76870 | tuf |
| Streptococcus mutans | GS-5 Kuramitsu | U75481 | tuf |
| Streptococcus mutans | UAB159 | Genome project² | tuf |
| Streptococcus oralis | NTCC 11427 | P331701 | tuf |
| Streptococcus pyogenes | | Genome project² | tuf (EF-G) |
| Streptococcus pyogenes | M1-GAS | Genome project² | tuf |
| Streptomyces aureofaciens | ATCC 10762 | AF007125 | tuf |
| Streptomyces cinnamoneus | Tue89 | X98831 | tuf |
| Streptomyces coelicolor | A3(2) | AL031013 | tuf (EF-G) |
| Streptomyces coelicolor | A3(2) | X77039 | tuf (EF-G) |
| Streptomyces coelicolor | M145 | X77039 | tuf |
| Streptomyces collinus | BSM 40733 | S79408 | tuf |
| Streptomyces netropsis | Tu1063 | AF153618 | tuf |
| Streptomyces ramocissimus | | X67057 | tuf |
| Streptomyces ramocissimus | | X67058 | tuf |
| Streptomyces ramocissimus | | X67057 | tuf (EF-G) |
| Synechococcus sp. | PCC 6301 | X17442 | tuf (EF-G) |
| Synechococcus sp. | PCC 6301 | X17442 | tuf |
| Synechocystis sp. | PCC 6803 | D90913 | tuf (EF-G) |
| Synechocystis sp. | PCC 6803 | D90913 | tuf |
| Synechocystis sp. | PCC 6803 | X65159 | tuf (EF-G) |
| Taxeobacter occealus | Myx 2105 | X77036 | tuf |
| Thermotoga maritima | | Genome project² | tuf (EF-G) |
| Thermotoga maritima | | M27479 | tuf |
| Thermus aquaticus | EP 00276 | X66322 | tuf |
| Thermus thermophilus | HB8 | X16278 | tuf (EF-G) |
| Thermus thermophilus | HB8 | X05977 | tuf |
| Thermus thermophilus | HB8 | X06657 | tuf |
| Thiomonas cuprina | DSM 5495 | U78300 | tuf |
| Thiomonas cuprina | DSM 5495 | U78300 | tuf (EF-G) |
| Thiomonas cuprina | Hoe5 | X76871 | tuf |
| Treponema denticola | | Genome project² | tuf |
| Treponema denticola | | Genome project² | tuf (EF-G) |
| Treponema pallidum | | AE001202 | tuf |
| Treponema pallidum | | AE001222 | tuf (EF-G) |
| Treponema pallidum | | AE001248 | tuf (EF-G) |
| Ureaplasma urealyticum | ATCC 33697 | Z34275 | tuf |
| Ureaplasma urealyticum | serovar 3 biovar 1 | AE002151 | tuf |
| Ureaplasma urealyticum | serovar 3 biovar 1 | AE002151 | tuf (EF-G) |
| Vibrio cholerae | N16961 | Genome project² | tuf |
| Wolinella succinogenes | DSM 1740 | X76872 | tuf |
| Yersinia pestis | CO-92 | Genome project² | tuf |
| Yersinia pestis | CO-92 | Genome project² | tuf (EF-G) |
| Archaebacteria | | | |
| Archaeoglobus fulgidus | | Genome project² | tuf (EF-G) |
| Halobacterium marismortui | | X16677 | tuf |
| Methanobacterium thermoautrophicum | delta H | AE000877 | tuf |
| Methanococcus jannaschii | ATCC 43067 | U67486 | tuf |
| Methanococcus vannielii | | X05698 | tuf |
| Pyrococcus abyssi | Orsay | AJ248285 | tuf |
| Thermoplasma acidophilum | DSM 1728 | X53866 | tuf |
| Fungi | | | |
| Absidia glauca | CBS 101.48 | X54730 | tuf (EF-1) |
| Arxula adeninivorans | Ls3 | Z47379 | tuf (EF-1) |
| Aspergillus oryzae | KBN616 | AB007770 | tuf (EF-1) |
| Aureobasidium pullulans | R106 | U19723 | tuf (EF-1) |
| Candida albicans | SC5314 | Genome project² | tuf (M) |
| Candida albicans | SC5314 | M29934 | tuf (EF-1) |
| Candida albicans | SC5314 | M29935 | tuf (EF-1) |
| Cryptococcus neoformans | B3501 | U81803 | tuf (EF-1) |
| Cryptococcus neoformans | M1-106 | U81804 | tuf (EF-1) |
| Eremothecium gossypii | ATCC 10895 | X73978 | tuf (EF-1) |
| Eremothecium gossypii | | A29820 | tuf (EF-1) |
| Fusarium oxysporum | NRRL 26037 | AF008498 | tuf (EF-1) |
| Histoplasma capsulatum | 186AS | U14100 | tuf (EF-1) |
| Podospora anserina | | X74799 | tuf (EF-1) |
| Podospora curvicolla | VLV | X96614 | tuf (EF-1) |
| Prototheca wickerhamii | 263-11 | AJ245645 | tuf (EF-1) |
| Puccinia graminis | race 32 | X73529 | tuf (EF-1) |
| Reclinomonas americana | ATCC 50394 | AF007261 | tuf (M) |
| Rhizomucor racemosus | ATCC 1216B | X17475 | tuf (EF-1) |
| Rhizomucor racemosus | ATCC 1216B | J02605 | tuf (EF-1) |
| Rhizomucor racemosus | ATCC 1216B | X17476 | tuf (EF-1) |
| Rhodotorula mucilaginosa | | AF016239 | tuf (EF-1) |
| Saccharomyces cerevisiae | | K00428 | tuf (M) |
| Saccharomyces cerevisiae | | M59369 | tuf (EF-G) |
| Saccharomyces cerevisiae | | X00779 | tuf (EF-1) |
| Saccharomyces cerevisiae | | X01638 | tuf (EF-1) |
| Saccharomyces cerevisiae | | M10992 | tuf (EF-1) |
| Saccharomyces cerevisiae | Alpha S288 | X78993 | tuf (EF-1) |
| Saccharomyces cerevisiae | | M15666 | tuf (EF-1) |
| Saccharomyces cerevisiae | | Z35987 | tuf (EF-1) |
| Saccharomyces cerevisiae | S288C (AB972) | U51033 | tuf (EF-1) |
| Schizophyllum commune | 1-40 | X94913 | tuf (EF-1) |
| Schizosaccharomyces pombe | 972h- | AL021816 | tuf (EF-1) |
| Schizosaccharomyces pombe | 972h- | AL021813 | tuf (EF-1) |
| Schizosaccharomyces pombe | 972h- | D82571 | tuf (EF-1) |
| Schizosaccharomyces pombe | | U42189 | tuf (EF-1) |
| Schizosaccharomyces pombe | PR745 | D89112 | tuf (EF-1) |
| Sordaria macrospora | OOO | X96615 | tuf (EF-1) |
| Trichoderma reesei | QM9414 | Z23012 | tuf (EF-1) |
| Yarrowia lipolytica | | AF054510 | tuf (EF-1) |
| Parasites | | | |
| Blastocystis hominis | HE87-1 | D64080 | tuf (EF-1) |
| Cryptosporidium parvum | | U69697 | tuf (EF-1) |
| Eimeria tenella | LS18 | AI755521 | tuf (EF-1) |
| Entamoeba histolytica | HM1:IMSS | X83565 | tuf (EF-1) |
| Entamoeba histolytica | NIH 200 | M92073 | tuf (EF-1) |
| Giardia lamblia | | D14342 | tuf (EF-1) |
| Kentrophoros sp. | | AF056101 | tuf (EF-1) |
| Leishmania amazonensis | IFLA/BR/67/PH8 | M92653 | tuf (EF-1) |
| Leishmania braziliensis | | U72244 | tuf (EF-1) |
| Onchocerca volvulus | | M64333 | tuf (EF-1) |
| Porphyra purpurea | Avonport | U08844 | tuf (EF-1) |
| Plasmodium berghei | ANKA | AJ224150 | tuf (EF-1) |
| Plasmodium falciparum | K1 | X60488 | tuf (EF-1) |
| Plasmodium knowlesi | line H | AJ224153 | tuf (EF-1) |
| Toxoplasma gondii | RH | Y11431 | tuf (EF-1) |
| Trichomonas tenax | ATCC 30207 | D78479 | tuf (EF-1) |
| Trypanosoma brucei | LVH/75/USAMRU-K/18Y | U10562 | tuf (EF-1) |
| Trypanosoma cruzi | | L76077 | tuf (EF-1) |
| Human and plants | | | |
| Arabidopsis thaliana | Columbia | X89227 | tuf (EF-1) |
| Glycine max | Ceresia | X89058 | tuf (EF-1) |
| Glycine max | Ceresia | Y15107 | tuf (EF-1) |
| Glycine max | Ceresia | Y15108 | tuf (EF-1) |
| Glycine max | Maple Arrow | X66062 | tuf (EF-1) |
| Homo sapiens | | X03558 | tuf (EF-1) |
| Pyramimonas disomata | | AB008010 | tuf |

atpD sequences

| | | | |
|---|---|---|---|
| Bacteria | | | |
| Acetobacterium woodi | DSM 1030 | U10505 | atpD |
| Actinobacillus actinomycetemcomitans | HK1651 | Genome project² | atpD |
| Bacillus anthracis | Ames | Genome project² | atpD |
| Bacillus firmus | OF4 | M60117 | atpD |
| Bacillus megaterium | QM B1551 | M20255 | atpD |
| Bacillus stearothermophilus | | D38058 | atpD |
| Bacillus stearothermophilus | IFO1035 | D38060 | atpD |
| Bacillus subtilis | 168 | Z28592 | atpD |
| Bacteroides fragilis | DSM 2151 | M22247 | atpD |
| Bordetella bronchiseptica | RB50 | Genome project² | atpD |
| Bordetella pertussis | Tohama 1 | Genome project² | atpD |
| Borrelia burgdorferi | B31 | AE001122 | atpD (V) |
| Burkholderia cepacia | DSM50181 | X76877 | atpD |
| Burkholderia pseudomallei | K96243 | Genome project² | atpD |
| Campylobacter jejuni | NCTC 11168 | CJ11168X1 | atpD |
| Chlamydia pneumoniae | | Genome project² | atpD (V) |
| Chlamydia trachomatis | MoPn | Genome project² | atpD (V) |
| Chlorobium vibrioforme | DSM 263 | X76873 | atpD |
| Citrobacter freundii | JEO503 | AF037156 | atpD |
| Clostridium acetobutylicum | ATCC 824 | Genome project² | atpD |
| Clostridium acetobutylicum | DSM 792 | AF101055 | atpD |
| Clostridium difficile | 630 | Genome project² | atpD |
| Corynebacterium diphtheriae | NCTC13129 | Genome project² | atpD |
| Corynebacterium glutamicum | ASO 19 | X76875 | atpD |
| Corynebacterium glutamicum | MJ-233 | E09634 | atpD |
| Cytophaga lytica | DSM 2039 | M22535 | atpD |
| Enterobacter aerogenes | DSM 30053 | —³ | atpD |
| Enterococcus faecalis | V583 | Genome project² | atpD (V) |
| Enterococcus hirae | | M90060 | atpD |
| Enterococcus hirae | ATCC 9790 | D17462 | atpD (V) |
| Escherichia coli | | J01594 | atpD |
| Escherichia coli | | M25464 | atpD |
| Escherichia coli | | V00267 | atpD |
| Escherichia coli | | V00311 | atpD |
| Escherichia coli | K12 MG1655 | L10328 | atpD |
| Flavobacterium ferrugineum | DSM 13524 | —³ | atpD |
| Haemophilus actinomycetemcomitans | | Genome project² | atpD |
| Haemophilus influenzae | Rd | U32730 | atpD |
| Helicobacter pylori | NCTC 11638 | AF004014 | atpD |
| Helicobacter pylori | 26695 | Genome project² | atpD |
| Helicobacter pylori | J99 | Genome project² | atpD |
| Klebsiella pneumoniae | M6H 78578 | Genome project² | atpD |
| Lactobacillus casei | DSM 20021 | X64542 | atpD |
| Legionella pneumophila | Philadelphia-1 | Genome project² | atpD |
| Moorella thermoacetica | ATCC 39073 | U64318 | atpD |
| Mycobacterium avium | 104 | Genome project² | atpD |
| Mycobacterium bovis | AF2122/97 | Genome project² | atpD |
| Mycobacterium leprae | | U15186 | atpD |
| Mycobacterium leprae | | Genome project² | atpD |
| Mycobacterium tuberculosis | H37Rv | Z73419 | atpD |
| Mycobacterium tuberculosis | CSU#93 | Genome project² | atpD |
| Mycoplasma gallisepticum | | X64256 | atpD |
| Mycoplasma genitalium | G37 | U39725 | atpD |
| Mycoplasma pneumoniae | M129 | U43738 | atpD |
| Neisseria gonorrhoeae | FA 1090 | Genome project² | atpD |
| Neisseria meningitidis | Z2491 | Genome project² | atpD |
| Pasteurella multocida | Pm70 | Genome project² | atpD |
| Pectinatus frisingensis | DSM 20465 | X64543 | atpD |
| Peptococcus niger | DSM 20475 | X76878 | atpD |
| Pirellula marina | IFAM 1313 | X57204 | atpD |
| Porphyromonas gingivalis | W83 | Genome project² | atpD (V) |
| Propionigenium modestum | DSM 2376 | X58461 | atpD |
| Pseudomonas aeruginosa | PAO1 | Genome project² | atpD |
| Pseudomonas putida | | Genome project² | atpD |
| Rhodobacter capsulatus | B100 | X99599 | atpD |
| Rhodospirillum rubrum | | X02499 | atpD |
| Rickettsia prowazekii | F-12 | AF036246 | atpD |
| Rickettsia prowazekii | Madrid | Genome project² | atpD |
| Ruminococcus albus | 7ATCC | AB006151 | atpD |
| Salmonella bongori | JEO4162 | AF037155 | atpD |
| Salmonella bongori | BR1859 | AF037154 | atpD |
| Salmonella choleraesuis | S83769 | AF037146 | atpD |
| subsp. arizonae | | | |
| Salmonella choleraesuis | u24 | AF037147 | atpD |
| subsp. arizonae | | | |
| Salmonella choleraesuis subsp. | K228 | AF037140 | atpD |
| choleraesuis serotype Dublin | | | |
| Salmonella choleraesuis subsp. | K771 | AF037139 | atpD |
| choleraesuis serotype Dublin | | | |
| Salmonella choleraesuis subsp. | Div36-86 | AF037142 | atpD |
| choleraesuis serotype Infantis | | | |
| Salmonella choleraesuis subsp. | Div95-86 | AF037143 | atpD |
| choleraesuis serotype Tennessee | | | |
| Salmonella choleraesuis subsp. | LT2 | AF037141 | atpD |
| choleraesuis serotype Typhimurium | | | |
| Salmonella choleraesuis | DS210/89 | AF037149 | atpD |
| subsp. diarizonae | | | |
| Salmonella choleraesuis | JEO307 | AF037148 | atpD |
| subsp. diarizonae | | | |
| Salmonella choleraesuis | S109671 | AF037150 | atpD |
| subsp. diarizonae | | | |
| Salmonella choleraesuis | S84366 | AF037151 | atpD |
| subsp. houtenae | | | |
| Salmonella choleraesuis | S84098 | AF037152 | atpD |
| subsp. houtenae | | | |
| Salmonella choleraesuis | BR2047 | AF037153 | atpD |
| subsp. indica | | | |
| Salmonella choleraesuis | NSC72 | AF037144 | atpD |
| subsp. salamae | | | |
| Salmonella choleraesuis | S114655 | AF037145 | atpD |
| subsp. salamae | | | |
| Shewanella putrefaciens | MR-1 | Genome project² | atpD |
| Staphylococcus aureus | COL | Genome project² | atpD |
| Stigmatella aurantiaca | Sga1 | X76879 | atpD |
| Streptococcus bovis | JB-1 | AB009314 | atpD |
| Streptococcus mutans | GS-5 | U31170 | atpD |
| Streptococcus mutans | UAB159 | Genome project² | atpD |
| Streptococcus pneumoniae | Type 4 | Genome project² | atpD (V) |
| Streptococcus pneumoniae | Type 4 | Genome project² | atpD |
| Streptococcus pyogenes | M1-GAS | Genome project² | atpD (V) |
| Streptococcus pyogenes | M1-GAS | Genome project² | atpD |
| Streptococcus sanguinis | 10904 | AF001955 | atpD |
| Streptomyces lividans | 1326 | Z22606 | atpD |
| Thermus thermophilus | HB8 | D63799 | atpD (V) |
| Thiobacillus ferrooxidans | ATCC 33020 | M81087 | atpD |
| Treponema pallidum | Nichols | AE001228 | atpD (V) |
| Vibrio alginolyticus | | X16050 | atpD |
| Vibrio cholerae | N16961 | Genome project² | atpD |
| Wolinella succinogenes | DSM 1470 | X76880 | atpD |
| Yersinia enterocolitica | NCTC 10460 | AF037157 | atpD |
| Yersinia pestis | CO-92 | Genome project² | atpD |
| Archaebacteria | | | |
| Archaeoglobus fulgidus | DSM 4304 | AE001023 | atpD (V) |
| Halobacterium salinarum | | S56356 | atpD (V) |
| Haloferax volcanii | WR 340 | X79516 | atpD |
| Methanococcus jannaschii | DSM 2661 | U67477 | atpD (V) |
| Methanosarcina barkeri | DSM 800 | J04836 | atpD (V) |
| Fungi | | | |
| Candida albicans | SC5314 | Genome project² | atpD |
| Candida tropicalis | | M64984 | atpD (V) |
| Kluyveromyces lactis | 2359/152 | U37764 | atpD |
| Neurospora crassa | | X53720 | atpD |
| Saccharomyces cerevisiae | | M12082 | atpD |
| Saccharomyces cerevisiae | X2180-1A | J05409 | atpD (V) |
| Schizosaccharomyces pombe | 972 h- | S47814 | atpD (V) |
| Schizosaccharomyces pombe | 972 h- | M57956 | atpD |
| Parasites | | | |
| Giardia lamblia | WB | U18938 | atpD |
| Plasmodium falciparum | 3D7 | L08200 | atpD (V) |
| Trypanosoma congolense | IL3000 | Z25814 | atpD (V) |
| Human and plants | | | |
| Homo sapiens | | L09234 | atpD (V) |
| Homo sapiens | | M27132 | atpD |

recA sequences

| | | | |
|---|---|---|---|
| Bacteria | | | |
| Acetobacter aceti | no. 1023 | S60630 | recA |
| Acetobacter altoacetigenes | MH-24 | E05290 | recA |
| Acetobacter polyoxogenes | NBI 1028 | D13183 | recA |
| Acholeplasma laidlawii | 8195 | M81465 | recA |
| Acidiphilium facilis | ATCC 35904 | D16538 | recA |
| Acidothermus cellulolyticus | ATCC 43068 | AJ006705 | recA |
| Acinetobacter calcoaceticus | BD413/ADP1 | L26100 | recA |
| Actinobacillus actinomycetemcomitans | HK1651 | Genome project² | recA |
| Aeromonas salmonicida | A449 | U83688 | recA |
| Agrobacterium tumefaciens | C58 | L07902 | recA |
| Allochromatium vinosum | | AJ000677 | recA |
| Aquifex aeolicus | VF5 | AE000775 | recA |
| Aquifex pyrophilus | Kol5a | L23135 | recA |
| Azotobacter vinelandii | | S96898 | recA |
| Bacillus stearothermophilus | 10 | Genome project² | recA |
| Bacillus subtilis | PB1831 | U87792 | recA |
| Bacillus subtilis | 168 | Z99112 | recA |
| Bacteroides fragilis | | M63029 | recA |
| Bifidobacterium breve | NCFB 2258 | AF094756 | recA |
| Blastochloris viridis | DSM 133 | AF022175 | recA |
| Bordetella pertussis | 165 | X53457 | recA |
| Bordetella pertussis | Tohama I | Genome project² | recA |
| Borrelia burgdorferi | Sh-2-82 | U23457 | recA |
| Borrelia burgdorferi | B31 | AE001124 | recA |
| Brevibacterium flavum | MJ-233 | E10390 | recA |
| Brucella abortus | 2308 | L00679 | recA |
| Burkholderia cepacia | ATCC 17616 | U70431 | recA |
| Burkholderia cepacia | | D90120 | recA |
| Burkholderia pseudomallei | K96243 | Genome project² | recA |
| Campylobacter fetus subsp. fetus | 23D | AF020677 | recA |
| Campylobacter jejuni | 81-176 | U03121 | recA |
| Campylobacter jejuni | NCTC 11168 | AL139079 | recA |
| Chlamydia trachomatis | L2 | U16739 | recA |
| Chlamydia trachomatis | D/UW-3/CX | AE001335 | recA |
| Chlamydophila pneumoniae | CWL029 | AE001658 | recA |
| Chloroflexus aurantiacus | J-10-fl | AF037259 | recA |
| Clostridium acetobutylicum | | M94057 | recA |
| Clostridium perfringens | 13 | U61497 | recA |
| Corynebacterium diphtheriae | NCTC13129 | Genome project² | recA |
| Corynebacterium glutamicum | AS019 | U14965 | recA |
| Corynebacterium pseudotuberculosis | C231 | U30387 | recA |
| Deinococcus radiodurans | KD8301 | AB005471 | recA |
| Deinococcus radiodurans | R1 | U01876 | recA |
| Enterobacter agglomerans | 339 | L03291 | recA |
| Enterococcus faecalis | OGIX | M81466 | recA |
| Erwinia carotovora | | X55554 | recA |
| Escherichia coli | | J01672 | recA |
| Escherichia coli | | X55552 | recA |
| Escherichia coli | K-12 | AE000354 | recA |
| Frankia alni | Arl3 | AJ006707 | recA |
| Gluconobacter oxydans | | U21001 | recA |
| Haemophilus influenzae | Rd | U32687 | recA |
| Haemophilus influenzae | Rd | U32741 | recA |
| Haemophilus influenzae | Rd | L07529 | recA |
| Helicobacter pylori | 69A | Z35478 | recA |
| Helicobacter pylori | 26695 | AE000536 | recA |
| Helicobacter pylori | J99 | AE001453 | recA |
| Klebsiella pneumoniae | M6H 78578 | Genome project² | recA |
| Lactococcus lactis | ML3 | M88106 | recA |
| Legionella pneumophila | | X55453 | recA |
| Leptospira biflexa | serovar patoc | U32625 | recA |
| Leptospira interrogans | serovar pomona | U29169 | recA |
| Magnetospirillum magnetotacticum | MS-1 | X17371 | recA |
| Methylobacillus flagellatus | MFK1 | M35325 | recA |
| Methylomonas clara | ATCC 31226 | X59514 | recA |
| Mycobacterium avium | 104 | Genome project² | recA |
| Mycobacterium bovis | AF122/97 | Genome project² | recA |
| Mycobacterium leprae | | X73822 | recA |
| Mycobacterium tuberculosis | H37Rv | X58485 | recA |
| Mycobacterium tuberculosis | CSU#93 | Genome project² | recA |
| Mycoplasma genitalium | G37 | U39717 | recA |
| Mycoplasma mycoides | GM9 | L22073 | recA |
| Mycoplasma pneumoniae | ATCC 29342 | MPAE000033 | recA |
| Mycoplasma pulmonis | KD735 | L22074 | recA |
| Myxococcus xanthus | | L40368 | recA |
| Myxococcus xanthus | | L40367 | recA |
| Neisseria animalis | NCTC 10212 | U57910 | recA |
| Neisseria cinerea | LCDC 81-176 | AJ223869 | recA |
| Neisseria cinerea | LNP 1646 | U57906 | recA |
| Neisseria cinerea | NCTC 10294 | AJ223871 | recA |
| Neisseria cinerea | Vedros M601 | AJ223870 | recA |
| Neisseria elongata | CCUG 2131 | AJ223882 | recA |
| Neisseria elongata | CCUG 4165A | AJ223880 | recA |
| Neisseria elongata | NCTC 10660 | AJ223881 | recA |
| Neisseria elongata | NCTC 11050 | AJ223878 | recA |
| Neisseria elongata | NHITCC 2376 | AJ223877 | recA |
| Neisseria elongata | CCUG 4557 | AJ223879 | recA |
| subsp. intermedia | | | |
| Neisseria flava | Bangor 9 | AJ223873 | recA |
| Neisseria flavescens | LNP 444 | U57907 | recA |
| Neisseria gonorrhoeae | CH95 | U57902 | recA |
| Neisseria gonorrhoeae | FA19 | X64842 | recA |
| Neisseria gonorrhoeae | MS11 | X17374 | recA |
| Neisseria gonorrhoeae | | Genome project² | recA |
| Neisseria lactamica | CCUC 7757 | AJ223866 | recA |
| Neisseria lactamica | CCUG 7852 | Y11819 | recA |
| Neisseria lactamica | LCDC 77-143 | Y11818 | recA |
| Neisseria lactamica | LCDC 80-111 | AJ223864 | recA |
| Neisseria lactamica | LCDC 845 | AJ223865 | recA |
| Neisseria lactamica | NCTC 10617 | U57905 | recA |
| Neisseria lactamica | NCTC 10618 | AJ223863 | recA |
| Neisseria meningitidis | 44/46 | X64849 | recA |
| Neisseria meningitidis | Bangor 13 | AJ223868 | recA |
| Neisseria meningitidis | HF116 | X64848 | recA |
| Neisseria meningitidis | HF130 | X64844 | recA |
| Neisseria meningitidis | HF46 | X64847 | recA |
| Neisseria meningitidis | M470 | X64850 | recA |
| Neisseria meningitidis | N94II | X64846 | recA |
| Neisseria meningitidis | NCTC 8249 | AJ223867 | recA |
| Neisseria meningitidis | P63 | X64845 | recA |
| Neisseria meningitidis | S3446 | U57903 | recA |
| Neisseria meningitidis | FAM18 | Genome project² | recA |
| Neisseria mucosa | LNP 405 | U57908 | recA |
| Neisseria mucosa | Vedros M1801 | AJ223875 | recA |
| Neisseria perflava | CCUG 17915 | AJ223876 | recA |
| Neisseria perflava | LCDC 85402 | AJ223862 | recA |
| Neisseria pharyngis var. flava | NCTC 4590 | U57909 | recA |
| Neisseria polysaccharea | CCUG 18031 | Y11815 | recA |
| Neisseria polysaccharea | CCUG 24845 | Y11816 | recA |
| Neisseria polysaccharea | CCUG 24846 | Y11814 | recA |
| Neisseria polysaccharea | INS MA 3008 | Y11817 | recA |
| Neisseria polysaccharea | NCTC 11858 | U57904 | recA |
| Neisseria sicca | NRL 30016 | AJ223872 | recA |
| Neisseria subflava | NRL 30017 | AJ223874 | recA |
| Paracoccus denitrificans | DSM 413 | U59631 | recA |
| Pasteurella multocida | | X99324 | recA |
| Porphyromonas gingivalis | W83 | U70054 | recA |
| Prevotella ruminicola | JCM 8958 | U61227 | recA |
| Proteus mirabilis | pG1300 | X14870 | recA |
| Proteus vulgaris | | X55555 | recA |
| Pseudomonas aeruginosa | | X05691 | recA |
| Pseudomonas aeruginosa | PAM 7 | X52261 | recA |
| Pseudomonas aeruginosa | PAO12 | D13090 | recA |
| Pseudomonas fluorescens | OE 28.3 | M96558 | recA |
| Pseudomonas putida | | L12684 | recA |
| Pseudomonas putida | PpS145 | U70864 | recA |
| Rhizobium leguminosarum | VF39 | X59956 | recA |
| biovar viciae | | | |
| Rhizobium phaseoli | CNPAF512 | X62479 | recA |
| Rhodobacter capsulatus | J50 | X82183 | recA |
| Rhodobacter sphaeroides | 2.4.1 | X72705 | recA |
| Rhodopseudomonas palustris | N 7 | D84467 | recA |
| Rickettsia prowazekii | Madrid E | AJ235273 | recA |
| Rickettsia prowazekii | Madrid E | U01959 | recA |
| Serratia marcescens | | M22935 | recA |
| Shigella flexneri | | X55553 | recA |
| Shigella sonnei | KNIH104S | AF101227 | recA |
| Sinorhizobium meliloti | 2011 | X59957 | recA |
| Staphylococcus aureus | | L25893 | recA |
| Streptococcus gordonii | Challis V288 | L20574 | recA |
| Streptococcus mutans | UA96 | M81468 | recA |
| Streptococcus mutans | GS-5 | M61897 | recA |
| Streptococcus pneumoniae | | Z17307 | recA |
| Streptococcus pneumoniae | R800 | Z34303 | recA |
| Streptococcus pyogenes | NZ131 | U21934 | recA |
| Streptococcus pyogenes | D471 | M81469 | recA |
| Streptococcus salivarius | | M94062 | recA |
| subsp. thermophilus | | | |
| Streptomyces ambofaciens | DSM 40697 | Z30324 | recA |
| Streptomyces coelicolor | A3(2) | AL020958 | recA |
| Streptomyces lividans | TK24 | X76076 | recA |
| Streptomyces rimosus | R6 | X94233 | recA |
| Streptomyces venezuelae | ATCC10712 | U04837 | recA |
| Synechococcus sp. | PR6 | M29495 | recA |
| Synechocystis sp. | PCC6803 | D90917 | recA |
| Thermotoga maritima | | L23425 | recA |
| Thermotoga maritima | | AE001823 | recA |
| Thermus aquaticus | | L20095 | recA |
| Thermus thermophilus | HB8 | D17392 | recA |
| Thiobacillus ferrooxidans | | M26933 | recA |
| Treponema denticola | | Genome project² | recA |
| Treponema pallidum | Nichols | AE001243 | recA |
| Vibrio anguillarum | | M80525 | recA |
| Vibrio cholerae | 017 | X71969 | recA |
| Vibrio cholerae | 2740-80 | U10162 | recA |
| Vibrio cholerae | 569B | L42384 | recA |
| Vibrio cholerae | M549 | AF117881 | recA |
| Vibrio cholerae | M553 | AF117882 | recA |
| Vibrio cholerae | M645 | AF117883 | recA |
| Vibrio cholerae | M793 | AF117878 | recA |
| Vibrio cholerae | M794 | AF117880 | recA |
| Vibrio cholerae | M967 | AF117879 | recA |
| Xanthomonas citri | XW47 | AF006590 | recA |
| Xanthomonas oryzae | | AF013600 | recA |
| Xenorhabdus bovienii | T228/1 | U87924 | recA |
| Xenorhabdus nematophilus | AN6 | AF127333 | recA |
| Yersinia pestis | 231 | X75336 | recA |
| Yersinia pestis | CO-92 | Genome project² | recA |
| Fungi, parasites, human and plants | | | |
| Anabaena variabilis | ATCC 29413 | M29680 | recA |
| Arabidopsis thaliana | | U43652 | recA (Rad51) |
| Candida albicans | | U39808 | recA (Dmc1) |
| Coprinus cinereus | Okayama-7 | U21905 | recA (Rad51) |
| Emericella nidulans | | Z80341 | recA (Rad51) |
| Gallus gallus | | L09655 | recA (Rad51) |
| Homo sapiens | | D13804 | recA (Rad51) |
| Homo sapiens | | D63882 | recA (Dmc1) |
| Leishmania major | Friedlin | AF062379 | recA (Rad51) |
| Leishmania major | Friedlin | AF062380 | recA (Dmc1) |
| Mus musculus | | D58419 | recA (Dmc1) |
| Neurospora crassa | 74-OR23-1A | D29638 | recA (Rad51) |
| Saccharomyces cerevisiae | | D10023 | recA (Rad51) |
| Schizosaccharomyces pombe | | Z22691 | recA (Rad51) |
| Schizosaccharomyces pombe | 972h- | AL021817 | recA (Dmc1) |
| Tetrahymena thermophila | PB9R | AF064516 | recA (Rad51) |
| Trypanosoma brucei | stock 427 | Y13144 | recA (Rad51) |
| Ustilago maydis | | U62484 | recA (Rad51) |
| Xenopus laevis | | D38488 | recA (Rad51) |
| Xenopus laevis | | D38489 | recA (Rad51) |

*tuf indicates tuf sequences, including tuf genes, fusA genes and fusA-tuf intergenic spacers.
tuf (C) indicates tuf sequences divergent from main (usually A and B) copies of the elongation factor-Tu
tuf (EF-1) indicates tuf sequences of the eukaryotic type (elongation factor 1α)
tuf (M) indicates tuf sequences from organellar (mostly mitochondrial) origin
atpD indicates atpD sequences ot the F-type
atpD (V) indicates atpD sequences of the V-Type
recA indicates recA sequences
recA (Rad51) indicates rad51 sequences or homologs
recA (Dmc1) indicates dmc1 sequences or homologs
¹Nucleotides sequences published in Arch. Microbiol. 1990 153: 241-247
²These sequences are from theTIGR database (http://www.tigr.org/tdb/tdb.html)
³Nucleotides sequences published in FEMS Microbiology Letters 1988 50: 101-106

TABLE 12
Bacterial species used to test the specificity of the Staphylococcus-
specific amplification primers derived from tuf sequences.

| | |
|---|---|
| Strain | Reference number |

Staphylococcal species (n = 27)

| | |
|---|---|
| Staphylococcus arlettae | ATCC 43957 |
| Staphylococcus aureus | ATCC 35844 |
| subsp. anaerobius | |
| Staphylococcus aureus | ATCC 43300 |
| subsp. aureus | |
| Staphylococcus auricularis | ATCC 33753 |
| Staphylococcus capitis | ATCC 27840 |
| subsp. capitis | |
| Staphylococcus caprae | ATCC 35538 |
| Staphylococcus carnosus | ATCC 51365 |
| Staphylococcus chromogenes | ATCC 43764 |
| Staphylococcus cohnii | DSM 20260 |
| subsp. urealyticum | |
| Staphylococcus delphini | ATCC 49171 |
| Staphylococcus epidermidis | ATCC 14990 |
| Staphylococcus equorum | ATCC 43958 |
| Staphylococcus felis | ATCC 49168 |
| Staphylococcus gallinarum | ATCC 35539 |
| Staphylococcus haemolyticus | ATCC 29970 |
| Staphylococcus hominis | ATCC 27844 |
| Staphylococcus hyicus | ATCC 11249 |
| Staphylococcus intermedius | ATCC 29663 |
| Staphylococcus kloosis | ATCC 43959 |
| Staphylococcus lentus | ATCC 29070 |
| Staphylococcus lugdunensis | ATCC 43809 |
| Staphylococcus saprophyticus | ATCC 15305 |
| Staphylococcus schleiferi | ATCC 49545 |
| subsp. coagulans | |
| Staphylococcus sciuri | ATCC 29060 |
| subsp. sciuri | |
| Staphylococcus simulans | ATCC 27848 |
| Staphylococcus warneri | ATCC 27836 |
| Staphylococcus xylosus | ATCC 29971 |

Other Gram-positive bacteria (n = 20)

| | |
|---|---|
| Bacillus subtilis | ATCC 27370 |
| Enterococcus avium | ATCC 14025 |
| Enterococcus durans | ATCC 19432 |
| Enterococcus faecalis | ATCC 19433 |
| Enterococcus faecium | ATCC 19434 |
| Enterococcus flavescens | ATCC 49996 |
| Enterococcus gallinarum | ATCC 49573 |
| Lactobacillus acidophilus | ATCC 4356 |
| Lactococcus lactis | ATCC 11454 |
| Listeria innocua | ATCC 33090 |
| Listeria ivanovii | ATCC 19119 |
| Listeria monocytogenes | ATCC 15313 |
| Macrococcus caseolyticus | ATCC 13548 |
| Streptococcus agalactiae | ATCC 13813 |
| Streptococcus anginosus | ATCC 33397 |
| Streptococcus bovis | ATCC 33317 |
| Streptococcus mutans | ATCC 25175 |
| Streptococcus pneumoniae | ATCC 6303 |
| Streptococcus pyogenes | ATCC 19615 |
| Streptococcus salivarius | ATCC 7073 |

Gram-negative bacteria (n = 33)

| | |
|---|---|
| Acinetobacter baumannii | ATCC 19606 |
| Bacteroides distasonis | ATCC 8503 |
| Bacteroides fragilis | ATCC 25285 |
| Bulkholderia cepacia | ATCC 25416 |
| Bordetella pertussis | ATCC 9797 |
| Citrobacter freundii | ATCC 8090 |
| Enterobacter aerogenes | ATCC 13048 |
| Enterobacter cloacae | ATCC 13047 |
| Escherichia coli | ATCC 25922 |
| Haemophilus influenzae | ATCC 8907 |
| Haemophilus parahaemolyticus | ATCC 10014 |
| Haemophilus parainfluenzae | ATCC 7901 |
| Hafnia alvei | ATCC 13337 |
| Kingella indologenes | ATCC 25869 |
| Klebsiella oxytoca | ATCC 13182 |
| Klebsiella pneumoniae | ATCC 13883 |
| Moraxella catarrhalis | ATCC 25240 |
| Morganella morganii | ATCC 25830 |
| Neisseria gonorrhoeae | ATCC 35201 |
| Neisseria meningitidis | ATCC 13077 |
| Proteus mirabilis | ATCC 25933 |
| Proteus vulgaris | ATCC 13315 |
| Providencia rettgeri | ATCC 9250 |
| Providencia stuartii | ATCC 29914 |
| Pseudomonas aeruginosa | ATCC 27853 |
| Pseudomonas fluorencens | ATCC 13525 |
| Salmonella choleraesuis | ATCC 7001 |
| Salmonella typhimurium | ATCC 14028 |
| Serratia marcescens | ATCC 8100 |
| Shigella flexneri | ATCC 12022 |
| Shigella sonnei | ATCC 29930 |
| Stenotrophomonas maltophilia | ATCC 13843 |
| Yersinia enterocolitica | ATCC 9610 |

TABLE 13
Bacterial species used to test the specificity of the
penicillin-resistant Streptococcus pneumoniae assay.

| | |
|---|---|
| Strain | Reference number |

Gram-positive species (n = 67)

| | |
|---|---|
| Abiotrophia adiacens | ATCC 49175 |
| Abiotrophia defectiva | ATCC 49176 |
| Actinomyces pyogenes | ATCC 19411 |
| Bacillus anthracis | ATCC 4229 |
| Bacillus cereus | ATCC 14579 |
| Bifidobacterium breve | ATCC 15700 |
| Clostridium difficile | ATCC 9689 |
| Enterococcus avium | ATCC 14025 |
| Enterococcus casseliflavus | ATCC 25788 |
| Enterococcus dispar | ATCC 51266 |
| Enterococcus durans | ATCC 19432 |
| Enterococcus faecalis | ATCC 29212 |
| Enterococcus faecium | ATCC 19434 |
| Enterococcus flavescens | ATCC 49996 |
| Enterococcus gallinarum | ATCC 49573 |
| Enterococcus hirae | ATCC 8043 |
| Enterococcus mundtii | ATCC 43186 |
| Enterococcus raffinosus | ATCC 49427 |
| Lactobacillus lactis | ATCC 19435 |
| Lactobacillus monocytogenes | ATCC 15313 |
| Mobiluncus curtisii | ATCC 35242 |
| Peptococcus niger | ATCC 27731 |
| Peptostreptococcus acones | ATCC 6919 |
| Peptostreptococcus anaerobius | ATCC 27337 |
| Peptostreptococcus | ATCC 2639 |
| asaccharolyticus | |
| Peptostreptococcus lactolyticus | ATCC 51172 |
| Peptostreptococcus magnus | ATCC 15794 |
| Peptostreptococcus prevotii | ATCC 9321 |
| Peptostreptococcus tetradius | ATCC 35098 |
| Staphylococcus aureus | ATCC 25923 |
| Staphylococcus capitis | ATCC 27840 |
| Staphylococcus epidermidis | ATCC 14990 |
| Staphylococcus haemolyticus | ATCC 29970 |
| Staphylococcus hominis | ATCC 27844 |
| Staphylococcus lugdunensis | ATCC 43809 |
| Staphylococcus saprophyticus | ATCC 15305 |
| Staphylococcus simulans | ATCC 27848 |
| Staphylococcus. warneri | ATCC 27836 |
| Streptococcus acidominimus | ATCC 51726 |
| Streptococcus agalactiae | ATCC 12403 |
| Streptococcus anginosus | ATCC 33397 |
| Streptococcus bovis | ATCC 33317 |
| Streptococcus constellatus | ATCC 27823 |
| Streptococcus cricetus | ATCC 19624 |
| Streptococcus cristatus | ATCC 51100 |
| Streptococcus downei | ATCC 33748 |
| Streptococcus dysgalactiae | ATCC 43078 |
| Streptococcus equi | ATCC 9528 |
| Streptococcus ferus | ATCC 33477 |
| Streptococcus gordonii | ATCC 10558 |
| Streptococcus intermedius | ATCC 27335 |
| Streptococcus mitis | ATCC 903 |
| Streptococcus mitis | LSPQ 2583 |
| Streptococcus mitis | ATCC 49456 |
| Streptococcus mutans | ATCC 27175 |
| Streptococcus oralis | ATCC 10557 |
| Streptococcus oralis | ATCC 9811 |
| Streptococcus oralis | ATCC 35037 |
| Streptococcus parasanguinis | ATCC 15912 |
| Streptococcus parauberis | ATCC 6631 |
| Streptococcus rattus | ATCC 15912 |
| Streptococcus salivarius | ATCC 7073 |
| Streptococcus sanguinis | ATCC 10556 |
| Streptococcus suis | ATCC 43765 |
| Streptococcus uberis | ATCC 19436 |
| Streptococcus vestibularis | ATCC 49124 |

Gram-negative species (n = 33)

| | |
|---|---|
| Actinetobacter baumannii | ATCC 19606 |
| Bordetella pertussis | ATCC 9797 |
| Citrobacter diversus | ATCC 27028 |
| Citrobacter freundii | ATCC 8090 |
| Enterobacter aerogenes | ATCC 13048 |
| Enterobacter agglomerans | ATCC 27155 |
| Enterobacter cloacae | ATCC 13047 |
| Escherichia coli | ATCC 25922 |
| Haemophilus ducreyi | ATCC 33940 |
| Haemophilus haemolyticus | ATCC 33390 |
| Haemophilus influenzae | ATCC 9007 |
| Haemophilus parainfluenzae | ATCC 7901 |
| Hafnia alvei | ATCC 13337 |
| Klebsiella oxytoca | ATCC 13182 |
| Klebsiella pneumoniae | ATCC 13883 |
| Moraxella atlantae | ATCC 29525 |
| Moraxella catarrhalis | ATCC 43628 |
| Moraxella morganii | ATCC 13077 |
| Neisseria gonorrhoeae | ATCC 35201 |
| Neisseria meningitidis | ATCC 13077 |
| Proteus mirabilis | ATCC 25933 |
| Proteus vulgaris | ATCC 13315 |
| Providencia alcalifaciens | ATCC 9886 |
| Providencia rettgeri | ATCC 9250 |
| Providencia rustigianii | ATCC 33673 |
| Providencia stuartii | ATCC 33672 |
| Pseudomonas aeruginosa | ATCC 35554 |
| Pseudomonas fluorescens | ATCC 13525 |
| Pseudomonas stutzeri | ATCC 17588 |
| Salmonella typhimurium | ATCC 14028 |
| Serratia marcescens | ATCC 13880 |
| Shigella flexneri | ATCC 12022 |
| Yersina enterocolitica | ATCC 9610 |

TABLE 14
Bacterial species (n = 104) detected by the platelet
contaminants assay. Bold characters indicate the major
bacterial contaminants found in platelet concentrates.

Abiotrophia adiacens
Abiotrophia defectiva
Acinetobacter baumannii
Acinetobacter lwoffi
Aerococcus viridans
Bacillus anthracis

[symbol]

[symbol]

Brucella abortus
Burkholderia cepacia
Citrobacter diversus
Citrobacter freundii
Enterobacter aerogenes
Enterobacter agglomerans

[symbol]

Enterococcus avium
Enterococcus casseliflavus
Enterococcus dispar
Enterococcus durans
Enterococcus faecalis
Enterococcus faecium
Enterococcus flavescens
Enterococcus gallinarum
Enterococcus mundtii
Enterococcus raffinosus
Enterococcus solitarius

[symbol]

Gemella morbillorum
Haemophilus ducreyi
Haemophilus haemolyticus
Haemophilus influenzae
Haemophilus parahaemolyticus
Haemophilus parainfluenzae
Hafnia alvei
Kingella kingae

[symbol]

[symbol]

Legionella pneumophila
Megamonas hypermegale
Moraxella atlantae
Moraxella catarrhalis
Morganella morganii
Neisseria gonorrheae
Neisseria meningitidis
Pasteurella aerogenes
Pasteurella multocida
Peptostreptococcus magnus
Proteus mirabilis
Providencia alcalifaciens
Providencia rettgeri
Providencia rustigianii
Providencia stuartii

[symbol]

Pseudomonas fluorescens
Pseudomonas stutzeri
Salmonella bangori

[symbol]

Salmonella enteritidis
Salmonella gallinarum
Salmonella typhimurium
Serratia liquefaciens

[symbol]

Shigella flexneri
Shigella sonnei

[symbol]

Staphylococcus capitis

[symbol]

Staphylococcus haemolyticus
Staphylococcus hominis
Staphylococcus lugdunensis
Staphylococcus saprophyticus
Staphylococcus simulans
Staphylococcus warneri
Stenotrophomonas maltophilia
Streptococcus acidominimus

[symbol]

Streptococcus anginosus
Streptococcus bovis
Streptococcus constellatus
Streptococcus cricetus
Streptococcus cristatus
Streptococcus dysgalactiae
Streptococcus equi
Streptococcus ferus
Streptococcus gordonii
Streptococcus intermedius
Streptococcus macacae
Streptococcus mitis

[symbol]

Streptococcus oralis
Streptococcus parasanguinis
Streptococcus parauberis
Streptococcus pneumoniae

[symbol]

Streptococcus ratti

[symbol]

[symbol]

Streptococcus sobrinus
Streptococcus uberis
Streptococcus vestibularis
Vibrio cholerae
Yersinia enterocolitica
Yersinia pestis

[symbol]

TABLE 15
Microorganisms identified by commercial systems¹.

Abiotrophia adiacens (Streptococcus
adjacens)
Abiotrophia defectiva (Streptococcus
defectivus)
Achromobacter species
Acidaminococcus fermentans
Acinetobacter alcaligenes
Acinetobacter anitratus
Acinetobacter baumannii
Acinetobacter calcoaceticus
Acinetobacter calcoaceticus biovar
anitratus
Acinetobacter calcoaceticus biovar
lwoffi
Acinetobacter genomo species
Acinetobacter haemolyticus
Acinetobacter johnsonii
Acinetobacter junii
Acinetobacter lwoffii
Acinetobacter radioresistens
Acinetobacter species
Actinobacillus
actinomycetemcomitans
Actinobacillus capsulatus
Actinobacillus equuli
Actinobacillus hominis
Actinobacillus lignieresii
Actinobacillus pleuropneumoniae
Actinobacillus species
Actinobacillus suis
Actinobacillus ureae
Actinomyces bovis
Actinomyces israelii
Actinomyces meyeri
Actinomyces naeslundii
Actinomyces neuii subsp. anitratus
Actinomyces neuii subsp. neuii
Actinomyces odontolyticus
Actinomyces pyogenes
Actinomyces radingae
Actinomyces species
Actinomyces turicensis
Actinomyces viscosus
Aerococcus species
Aerococcus viridans
Aeromonas caviae
Aeromonas hydrophila
Aeromonas hydrophila group
Aeromonas jandaei
Aeromonas salmonicida
Aeromonas salmonicida subsp.
achromogenes
Aeromonas salmonicida subsp.
masoucida
Aeromonas salmonicida subsp.
salmonicida
Aeromonas schubertii
Aeromonas sobria
Aeromonas species
Aeromonas trota
Aeromonas veronii
Aeromonas veronii biovar sobria
Aeromonas veronii biovar veronii
Agrobacterium radiobacter
Agrobacterium species
Agrobacterium tumefaciens
Alcaligenes denitrificans
Alcaligenes faecalis
Alcaligenes odorans
Alcaligenes odorans (Alcaligenes
faecalis)
Alcaligenes species
Alcaligenes xylosoxidans
Alcaligenes xylosoxidans subsp.
denitrificans
Alcaligenes xylosoxidans subsp.
xylosoxidans
Alloiococcus otitis
Anaerobiospirillum succiniciproducens
Anaerovibrio lipolytica
Arachnia propionica
Arcanobacterium (Actinomyces)
bemardiae
Arcanobacterium (Actinomyces)
pyogenes
Arcanobacterium haemolyticum
Arcobacter cryaerophilus
(Campylobacter cryaerophila)
Arthrobacter globiformis
Arthrobacter species
Arxiozyma telluris (Torulopsis
pintolopesii)
Atopobium minutum (Lactobacillus
minutus)
Aureobacterium species
Bacillus amyloliquefaciens
Bacillus anthracis
Bacillus badius
Bacillus cereus
Bacillus circulans
Bacillus coagulans
Bacillus firmus
Bacillus lentus
Bacillus licheniformis
Bacillus megaterium
Bacillus mycoides
Bacillus pantothenticus
Bacillus pumilus
Bacillus species
Bacillus sphaericus
Bacillus stearothermophilus
Bacillus subtilis
Bacillus thuringiensis
Bacteroides caccae
Bacteroides capillosus
Bacteroides distasonis
Bacteroides eggerthii
Bacteroides fragilis
Bacteroides merdae
Bacteroides ovatus
Bacteroides species
Bacteroides splanchnicus
Bacteroides stercoris
Bacteroides thetaiotaomicron
Bacteroides uniformis
Bacteroides ureolyticus (B. corrodens)
Bacteroides vulgatus
Bergeyella (Weeksella) zoohelcum
Bifidobacterium adolescentis
Bifidobacterium bifidum
Bifidobacterium breve
Bifidobacterium dentium
Bifidobacterium infantis
Bifidobacterium species
Blastoschizomyces (Dipodascus)
capitatus
Bordetella avium
Bordetella bronchiseptica
Bordetella parapertussis
Bordetella pertussis
Bordetella species
Borrelia species
Branhamella (Moraxella) catarrhalis
Branhamella species
Brevibacillus brevis
Brevibacillus laterosporus
Brevibacterium casei
Brevibacterium epidermidis
Brevibacterium linens
Brevibacterium species
Brevundimonas (Pseudomonas)
diminuta
Brevundimonas (Pseudomonas)
vesicularis
Brevundimonas species
Brochothrix thermosphacta
Brucella abortus
Brucella canis
Brucella melitensis
Brucella ovis
Brucella species
Brucella suis
Budvicia aquatica
Burkholderia (Pseudomonas) cepacia
Burkholderia (Pseudomonas) gladioli
Burkholderia (Pseudomonas) mallei
Burkholderia (Pseudomonas)
pseudomallei
Burkholderia species
Buttiauxella agrestis
Campylobacter coli
Campylobacter concisus
Campylobacter fetus
Campylobacter fetus subsp. fetus
Campylobacter fetus subsp.
venerealis
Campylobacter hyointestinalis
Campylobacter jejuni subsp. doylei
Campylobacter jejuni subsp. jejuni
Campylobacter lari
Campylobacter lari subsp. UPTC
Campylobacter mucosalis
Campylobacter species
Campylobacter sputorum
Campylobacter sputorum subsp.
bubulus
Campylobacter sputorum subsp.
fecalis
Campylobacter sputorum subsp.
sputorum
Campylobacter upsaliensis
Candida (Clavispora) lusitaniae
Candida (Pichia) guilliermondii
Candida (Torulopsis) glabrata
Candida albicans
Candida boidinii
Candida catenulata
Candida ciferrii
Candida colliculosa
Candida conglobata
Candida curvata (Cryptococcus
curvatus)
Candida dattila
Candida dubliniensis
Candida famata
Candida globosa
Candida hellenica
Candida holmii
Candida humicola
Candida inconspicua
Candida intermedia
Candida kefyr
Candida krusei
Candida lambica
Candida magnoliae
Candida maris
Candida melibiosica
Candida membranaefaciens
Candida norvegensis
Candida norvegica
Candida parapsilosis
Candida paratropicalis
Candida pelliculosa
Candida pseudotropicalis
Candida pulcherrima
Candida ravautii
Candida rugosa
Candida sake
Candida silvicola
Candida species
Candida sphaerica
Candida stellatoidea
Candida tenuis
Candida tropicalis
Candida utilis
Candida valida
Candida vini
Candida viswanathii
Candida zeylanoides
Capnocytophaga gingivalis
Capnocytophaga ochracea
Capnocytophaga species
Capnocytophaga sputigena
Cardiobacterium hominis
Camobacterium divergens
Camobacterium piscicola
CDC group ED-2
CDC group EF4 (Pasteurella sp.)
CDC group EF-4A
CDC group EF-4B
CDC group EQ-Z
CDC group HB-5
CDC group II K-2
CDC group IV C-2 (Bordetella-like)
CDC group M5
CDC group M6
Cedecea davisae
Cedecea lapagei
Cedecea neteri
Cedecea species
Cellulomonas (Oerskovia) turbata
Cellulomonas species
Chlamydia species
Chromobacterium violaceum
Chryseobacterium (Flavobacterium)
indologenes
Chryseobacterium (Flavobacterium)
meningosepticum
Chryseobacterium gleum
Chryseobacterium species
Chryseomonas indologenes
Citeromyces matritensis
Citrobacter amalonaticus
Citrobacter braakii
Citrobacter diversus
Citrobacter farmeri
Citrobacter freundii
Citrobacter freundii complex
Citrobacter koseri
Citrobacter sedlakii
Citrobacter species
Citrobacter werkmanii
Citrobacter youngae
Clostridium acetobutylicum
Clostridium barati
Clostridium beijerinckii
Clostridium bifermentans
Clostridium botulinum
Clostridium botulinum (NP) B&F
Clostridium botulinum (NP) E
Clostridium botulinum (P) A&H
Clostridium botulinum (P) F
Clostridium botulinum G1
Clostridium botulinum G2
Clostridium butyricum
Clostridium cadaveris
Clostridium chauvoei
Clostridium clostridiiforme
Clostridium difficile
Clostridium fallax
Clostridium glycolicum
Clostridium hastiforme
Clostridium histolyticum
Clostridium innocuum
Clostridium limosum
Clostridium novyi
Clostridium novyi A
Clostridium paraputrificum
Clostridium perfringens
Clostridium putrificum
Clostridium ramosum
Clostridium septicum
Clostridium sordellii
Clostridium species
Clostridium sphenoides
Clostridium sporogenes
Clostridium subterminale
Clostridium tertium
Clostridium tetani
Clostridium tyrobutyricum
Comamonas (Pseudomonas)
acidovorans
Comamonas (Pseudomonas)
testosteroni
Comamonas species
Corynebacterium accolens
Corynebacterium afermentans
Corynebacterium amycolatum
Corynebacterium aquaticum
Corynebacterium argentoratense
Corynebacterium auris
Corynebacterium bovis
Corynebacterium coyleae
Corynebacterium cystitidis
Corynebacterium diphtheriae
Corynebacterium diphtheriae biotype
belfanti
Corynebacterium diphtheriae biotype
gravis
Corynebacterium diphtheriae biotype
intermedius
Corynebacterium diphtheriae biotype
mitis
Corynebacterium flavescens
Corynebacterium glucuronolyticum
Corynebacterium glucuronolyticum-
seminale
Corynebacterium group A
Corynebacterium group A-4
Corynebacterium group A-5
Corynebacterium group ANF
Corynebacterium group B
Corynebacterium group B-3
Corynebacterium group F
Corynebacterium group F-1
Corynebacterium group F-2
Corynebacterium group G
Corynebacterium group G-1
Corynebacterium group G-2
Corynebacterium group I
Corynebacterium group I-2
Corynebacterium jeikeium (group JK)
Corynebacterium kutscheri (C. murium)
Corynebacterium macginleyi
Corynebacterium minutissimum
Corynebacterium pilosum
Corynebacterium propinquum
Corynebacterium
pseudodiphtheriticum
Corynebacterium pseudotuberculosis
Corynebacterium pyogenes
Corynebacterium renale
Corynebacterium renale group
Corynebacterium seminale
Corynebacterium species
Corynebacterium striatum (C. flavidum)
Corynebacterium ulcerans
Corynebacterium urealyticum (group
D2)
Corynebacterium xerosis
Cryptococcus albidus
Cryptococcus ater
Cryptococcus cereanus
Cryptococcus gastricus
Cryptococcus humicolus
Cryptococcus lactativorus
Cryptococcus laurentii
Cryptococcus luteolus
Cryptococcus melibiosum
Cryptococcus neoformans
Cryptococcus species
Cryptococcus terreus
Cryptococcus uniguttulatus
Debaryomyces hansenii
Debaryomyces marama
Debaryomyces polymorphus
Debaryomyces species
Dermabacter hominis
Dermacoccus (Micrococcus)
nishinomiyaensis
Dietzia species
Edwardsiella hoshinae
Edwardsiella ictaluri
Edwardsiella species
Edwardsiella tarda
Eikenella corrodens
Empedobacter brevis (Flavobacterium
breve)
Enterobacter aerogenes
Enterobacter agglomerans
Enterobacter amnigenus
Enterobacter amnigenus asburiae
(CDC enteric group 17)
Enterobacter amnigenus biogroup 1
Enterobacter amnigenus biogroup 2
Enterobacter asburiae
Enterobacter cancerogenus
Enterobacter cloacae
Enterobacter gergoviae
Enterobacter hormaechei
Enterobacter intermedius
Enterobacter sakazakii
Enterobacter species
Enterobacter taylorae
Enterobacter taylorae (CDC enteric
group 19)
Enterococcus (Streptococcus)
cecorum
Enterococcus (Streptococcus)
faecalis (Group D)
Enterococcus (Streptococcus)
faecium (Group D)
Enterococcus (Streptococcus)
saccharolyticus
Enterococcus avium (Group D)
Enterococcus casseliflavus
(Steptococcus faecium subsp.
casseliflavus)
Enterococcus durans (Streptococcus
faecium subsp. durans) (Group D)
Enterococcus gallinarum
Enterococcus hirae
Enterococcus malodoratus
Enterococcus mundtii
Enterococcus raffinosus
Enterococcus species
Erwinia amylovora
Erwinia carotovora
Erwinia carotovora subsp. atroseptica
Erwinia carotovora subsp.
betavasculorum
Erwinia carotovora subsp. carotovora
Erwinia chrysanthemi
Erwinia cypripedii
Erwinia mallotivora
Erwinia nigrifluens
Erwinia quercina
Erwinia rhapontici
Erwinia rubrifaciens
Erwinia salicis
Erwinia species
Erysipelothrix rhusiopathiae
Erysipelothrix species
Escherichia blattae
Escherichia coli
Escherichia coli A-D
Escherichia coli O157:H7
Escherichia fergusonii
Escherichia hermannii
Escherichia species
Escherichia vulneris
Eubacterium aerofaciens
Eubacterium alactolyticum
Eubacterium lentum
Eubacterium limosum
Eubacterium species
Ewingella americana
Filobasidiella neoformans
Filobasidium floriforme
Filobasidium uniguttulatum
Flavimonas oryzihabitans
Flavobacterium gleum
Flavobacterium indologenes
Flavobacterium odoratum
Flavobacterium species
Francisella novicida
Francisella philomiragia
Francisella species
Francisella tularensis
Fusobacterium mortiferum
Fusobacterium necrogenes
Fusobacterium necrophorum
Fusobacterium nucleatum
Fusobacterium species
Fusobacterium varium
Gaffkya species
Gardnerella vaginalis
Gemella haemolysans
Gemella morbillorum
Gemella species
Geotrichum candidum
Geotrichum fermentans
Geotrichum penicillarum
Geotrichum penicillatum
Geotrichum species
Gordona species
Haemophilus aegyptius
Haemophilus aphrophilus
Haemophilus ducreyi
Haemophilus haemoglobinophilus
Haemophilus haemolyticus
Haemophilus influenzae
Haemophilus influenzae biotype I
Haemophilus influenzae biotype II
Haemophilus influenzae biotype III
Haemophilus influenzae biotype IV
Haemophilus influenzae biotype V
Haemophilus influenzae biotype VI
Haemophilus influenzae biotype VII
Haemophilus influenzae biotype VIII
Haemophilus paragallinarum
Haemophilus parahaemolyticus
Haemophilus parainfluenzae
Haemophilus parainfluenzae biotype I
Haemophilus parainfluenzae biotype II
Haemophilus parainfluenzae biotype
III
Haemophilus parainfluenzae biotype
IV
Haemophilus parainfluenzae biotype V
Haemophilus parainfluenzae biotype
VI
Haemophilus parainfluenzae biotype
VII
Haemophilus parainfluenzae biotype
VIII
Haemophilus paraphrohaemolyticus
Haemophilus paraphrophilus
Haemophilus segnis
Haemophilus somnus
Haemophilus species
Hafnia alvei
Hanseniaspora guilliermondii
Hanseniaspora uvarum
Hanseniaspora valbyensis
Hansenula anomala
Hansenula holstii
Hansenula polymorpha
Helicobacter (Campylobacter) cinaedi
Helicobacter (Campylobacter)
fennelliae
Helicobacter (Campylobacter) pylori
Issatchenkia orientalis
Kingella denitrificans
Kingella indologenes
Kingella kingae
Kingella species
Klebsiella ornithinolytica
Klebsiella oxytoca
Klebsiella planticola
Klebsiella pneumoniae subsp.
ozaenae
Klebsiella pneumoniae subsp.
pneumoniae
Klebsiella pneumoniae subsp.
rhinoscleromatis
Klebsiella species
Klebsiella terrigena
Kloeckera apiculata
Kloeckera apis
Kloeckera japonica
Kloeckera species
Kluyvera ascorbata
Kluyvera cryocrescens
Kluyvera species
Kluyveromyces lactis
Kluyveromyces marxianus
Kluyveromyces thermotolerans
Kocuria (Micrococcus) kristinae
Kocuria (Micrococcus) rosea
Kocuria (Micrococcus) varians
Koserella trabulsii
Kytococcus (Micrococcus)
sedentarius
Lactobacillus (Weissella) viridescens
Lactobacillus A
Lactobacillus acidophilus
Lactobacillus B
Lactobacillus brevis
Lactobacillus buchneri
Lactobacillus casei
Lactobacillus casei subsp. casei
Lactobacillus casei subsp. lactosus
Lactobacillus casei subsp. rhamnosus
Lactobacillus catenaformis
Lactobacillus cellobiosus
Lactobacillus collinoides
Lactobacillus coprophilus
Lactobacillus crispatus
Lactobacillus curvatus
Lactobacillus delbrueckii subsp.
bulgaricus
Lactobacillus delbrueckii subsp.
delbrueckii
Lactobacillus delbrueckii subsp. lactis
Lactobacillus fermentum
Lactobacillus fructivorans
Lactobacillus helveticus
Lactobacillus helveticus subsp. jugurti
Lactobacillus jensenii
Lactobacillus lindneri
Lactobacillus minutus
Lactobacillus paracasei subsp.
paracasei
Lactobacillus pentosus
Lactobacillus plantarum
Lactobacillus salivarius
Lactobacillus salivarius var. salicinius
Lactobacillus species
Lactococcus diacitilactis
Lactococcus garvieae
Lactococcus lactis subsp. cremoris
Lactococcus lactis subsp. diacitilactis
Lactococcus lactis subsp. hordniae
Lactococcus lactis subsp. lactis
Lactococcus plantarum
Lactococcus raffinolactis
Leclercia adecarboxylata
Legionella species
Leminorella species
Leptospira species
Leptotrichia buccalis
Leuconostoc (Weissella)
paramesenteroides
Leuconostoc carnosum
Leuconostoc citreum
Leuconostoc gelidum
Leuconostoc lactis
Leuconostoc mesenteroides
Leuconostoc mesenteroides subsp.
cremoris
Leuconostoc mesenteroides subsp.
dextranicum
Leuconostoc mesenteroides subsp.
mesenteroides
Leuconostoc species
Listeria grayi
Listeria innocua
Listeria ivanovii
Listeria monocytogenes
Listeria murrayi
Listeria seeligeri
Listeria species
Listeria welshimeri
Megasphaera elsdenii
Methylobacterium mesophilicum
Metschnikowia pulcherrima
Microbacterium species
Micrococcus luteus
Micrococcus lylae
Micrococcus species
Mobiluncus curtisii
Mobiluncus mulieris
Mobiluncus species
Moellerella wisconsensis
Moraxella (Branhamella) catarrhalis
Moraxella atlantae
Moraxella bovis
Moraxella lacunata
Moraxella nonliquefaciens
Moraxella osloensis
Moraxella phenylpyruvica
Moraxella species
Morganella morganii
Morganella morganii subsp. morganii
Morganella morganii subsp. sibonii
Mycobacterium africanum
Mycobacterium asiaticum
Mycobacterium avium
Mycobacterium bovis
Mycobacterium chelonae
Mycobacterium fortuitum
Mycobacterium gordonae
Mycobacterium kansasii
Mycobacterium malmoense
Mycobacterium marinum
Mycobacterium phlei
Mycobacterium scrofulaceum
Mycobacterium smegmatis
Mycobacterium species
Mycobacterium tuberculosis
Mycobacterium ulcerans
Mycobacterium xenopi
Mycoplasma fermentans
Mycoplasma hominis
Mycoplasma orale
Mycoplasma pneumoniae
Mycoplasma species
Myroides species
Neisseria cinerea
Neisseria elongata subsp. elongata
Neisseria flava
Neisseria flavescens
Neisseria gonorrhoeae
Neisseria lactamica
Neisseria meningitidis
Neisseria mucosa
Neisseria perflava
Neisseria polysaccharea
Neisseria saprophytes
Neisseria sicca
Neisseria subflava
Neisseria weaveri
Neisseria weaveri (CDC group M5)
Nocardia species
Ochrobactrum anthropi
Oerskovia species
Oerskovia xanthineolytica
Oligella (Moraxella) urethralis
Oligella species
Oligella ureolytica
Paenibacillus alvei
Paenibacillus macerans
Paenibacillus polymyxa
Pantoea agglomerans
Pantoea ananas (Erwinia uredovora)
Pantoea dispersa
Pantoea species
Pantoea stewartii
Pasteurella (Haemophilus) avium
Pasteurella aerogenes
Pasteurella gallinarum
Pasteurella haemolytica
Pasteurella haemolyticus
Pasteurella multocida
Pasteurella multocida SF
Pasteurella multocida subsp.
multocida
Pasteurella multocida subsp. septica
Pasteurella pneumotropica
Pasteurella species
Pasteurella ureae
Pediococcus acidilactici
Pediococcus damnosus
Pediococcus pentosaceus
Pediococcus species
Peptococcus niger
Peptococcus species
Peptostreptococcus anaerobius
Peptostreptococcus asaccharolyticus
Peptostreptococcus indolicus
Peptostreptococcus magnus
Peptostreptococcus micros
Peptostreptococcus parvulus
Peptostreptococcus prevotii
Peptostreptococcus productus
Peptostreptococcus species
Peptostreptococcus tetradius
Phaecoccomyces exophialiae
Photobacterium damselae
Pichia (Hansenula) anomala
Pichia (Hansenula) jadinii
Pichia (Hansenula) petersonii
Pichia angusta (Hansenula
polymorpha)
Pichia carsonii (P. vini)
Pichia etchellsii
Pichia farinosa
Pichia fermentans
Pichia membranaefaciens
Pichia norvegensis
Pichia ohmeri
Pichia spartinae
Pichia species
Plesiomonas shigelloides
Porphyromonas asaccharolytica
Porphyromonas endodontalis
Porphyromonas gingivalis
Porphyromonas levii
Provotella (Bacteroides) buccae
Prevotella (Bacteroides) buccalis
Prevotella (Bacteroides) corporis
Pravotella (Bacteroides) denticola
Prevotella (Bacteroides) loescheii
Prevotella (Bacteroides) oralis
Prevotella (Bacteroides) disiens
Prevotella (Bacteroides) oris
Prevotella bivia (Bacteroides bivius)
Prevotella intermedia (Bacteroides
intermedius)
Prevotella melaninogenica
(Bacteroides melaninogenicus)
Prevotella ruminicola
Propionibacterium acnes
Propionibacterium avidum
Propionibacterium granulosum
Propionibacterium propionicum
Propionibacterium species
Proteus mirabilis
Proteus penneri
Proteus species
Proteus vulgaris
Prototheca species
Prototheca wickerhamii
Prototheca zopfii
Providencia alcalifaciens
Providencia heimbachae
Providencia rettgeri
Providencia rustigianii
Providencia species
Providencia stuartii
Providencia stuartii urea +
Pseudomonas (Chryseomonas)
luteola
Pseudomonas acidovorans
Pseudomonas aeruginosa
Pseudomonas alcaligenes
Pseudomonas cepacia
Pseudomonas chlororaphis (P. aureofaciens)
Pseudomonas fluorescens
Pseudomonas fluorescens group
Pseudomonas mendocina
Pseudomonas pseudoalcaligenes
Pseudomonas putida
Pseudomonas species
Pseudomonas stutzeri
Pseudomonas testosteroni
Pseudomonas vesicularis
Pseudoramibacter (Eubacterium)
alactolyticus
Psychrobacter (Moraxella)
phenylpyruvicus
Rahnella aquatilis
Ralstonia (Pseudomonas,
Burkholderia) pickettii
Rhodococcus (Corynebacterium) equi
Rhodococcus species
Rhodosporidium toruloides
Rhodotorula glutinis
Rhodotorula minuta
Rhodotorula mucilaginosa (R. rubra)
Rhodotorula species
Rickettsia species
Rothia dentocariosa
Saccharomyces cerevisiae
Saccharomyces exiguus
Saccharomyces kluyverii
Saccharomyces species
Sakaguchia dacryoides
(Rhodosporidium dacryoidum)
Salmonella arizonae
Salmonella choleraesuis
Salmonella enteritidis
Salmonella gallinarum
Salmonella paratyphi A
Salmonella paratyphi B
Salmonella pullorum
Salmonella species
Salmonella typhi
Salmonella typhimurium
Salmonella typhisuis
Salmonella/Arizona
Serratia ficaria
Serratia fonticola
Serratia grimesii
Serratia liquefaciens
Serratia marcescens
Serratia odorifera
Serratia odorifera type 1
Serratia odorifera type 2
Serratia plymuthica
Serratia proteamaculans
Serratia proteamaculans subsp.
proteamaculans
Serratia proteamaculans subsp.
quinovora
Serratia rubidaea
Serratia species
Shewanella (Pseudomonas,
Alteromonas) putrefaciens
Shigella boydii
Shigella dysenteriae
Shigella flexneri
Shigella sonneri
Shigella species
Sphingobacterium multivorum
Sphingobacterium species
Sphingobacterium spiritivorum
Sphingobacterium thalpophilum
Sphingomonas (Pseudomonas)
paucimobilis
Sporidiobolus salmonicolor
Sporobolomyces roseus
Sporobolomyces salmonicolor
Sporobolomyces species
Staphylococcus (Peptococcus)
saccharolyticus
Staphylococcus arlettae
Staphylococcus aureus
Staphylococcus aureus (Coagulase-
negative)
Staphylococcus auricularis
Staphylococcus capitis
Staphylococcus capitis subsp. capitis
Staphylococcus capitis subsp.
ureolyticus
Staphylococcus caprae
Staphylococcus carnosus
Staphylococcus caseolyticus
Staphylococcus chromogenes
Staphylococcus cohnii
Staphylococcus cohnii subsp. cohnii
Staphylococcus cohnii subsp.
urealyticum
Staphylococcus epidermidis
Staphylococcus equorum
Staphylococcus gallinarum
Staphylococcus haemolyticus
Staphylococcus hominis
Staphylococcus hominis subsp.
hominis
Staphylococcus hominis subsp.
novobiosepticus
Staphylococcus hyicus
Staphylococcus intermedius
Staphylococcus kloosii
Staphylococcus lentus
Staphylococcus lugdunensis
Staphylococcus saprophyticus
Staphylococcus schleiferi
Staphylococcus sciuri
Staphylococcus simulans
Staphylococcus species
Staphylococcus warneri
Staphylococcus xylosus
Stenotrophomonas (Xanthomonas)
maltophilia
Stephanoascus ciferrii
Stomatococcus mucilaginosus
Streptococcus acidominimus
Streptococcus agalactiae
Streptococcus agalactiae (Group B)
Streptococcus agalactiae hemolytic
Streptococcus agalactiae non-
hemolytic
Streptococcus alactolyticus
Streptococcus anginosus
Streptococcus anginosus (Group D,
nonenterococci)
Streptococcus beta-hemolytic group A
Streptococcus beta-hemolytic non-
group A or B
Streptococcus beta-hemolytic non-
group A
Streptococcus beta-hemolytic
Streptococcus bovis (Group D,
nonenterococci)
Streptococcus bovis I
Streptococcus bovis II
Streptococcus canis
Streptococcus constellatus
Streptococcus constellatus
(Streptococcus milleri I)
Streptococcus constellatus (viridans
Streptococcus)
Streptococcus downei
Streptococcus dysgalactiae subsp.
dysgalactiae
Streptococcus dysgalactiae subsp.
equisimilis
Streptococcus equi (Group C/Group G
Streptococcus)
Streptococcus equi subsp. equi
Streptococcus equi subsp.
zooepidemicus
Streptococcus equinus
Streptococcus equinus (Group D,
nonenterococci)
Streptococcus equisimilis
Streptococcus equisimulis (Group
C/Group G Streptococcus)
Streptococcus Gamma (non)-
hemolytic
Streptococcus gordonii
Streptococcus Group B
Streptococcus Group C
Streptococcus Group D
Streptococcus Group E
Streptococcus Group F
Streptococcus Group G
Streptococcus Group L
Streptococcus Group P
Streptococcus Group U
Streptococcus intermedius
Streptococcus intermedius
(Streptococcus milleri II)
Streptococcus intermedius (viridans
Streptococcus)
Streptococcus milleri group
Streptococcus mitis
Streptococcus mitis (viridans
Streptococcus)
Streptococcus mitis group
Streptococcus mutans
Streptococcus mutans (viridans
Streptococcus)
Streptococcus oralis
Streptococcus parasanguis
Streptococcus pneumoniae
Streptococcus porcinus
Streptococcus pyogenes
Streptococcus pyogenes (Group A)
Streptococcus salivarius
Streptococcus salivarius (viridans
Streptococcus)
Streptococcus salivarius subsp.
salivarius
Streptococcus salivarius subsp.
thermophilus
Streptococcus sanguis
Streptococcus sanguis I (viridans
Streptococcus)
Streptococcus sanguis II
Streptococcus sanguis II (viridans
Streptococcus)
Streptococcus sobrinus
Streptococcus species
Streptococcus suis I
Streptococcus suis II
Streptococcus uberis
Streptococcus uberis (viridans
Streptococcus)
Streptococcus vestibularis
Streptococcus zooepidemicus
Streptococcus zooepidemicus (Group
C)
Streptomyces somaliensis
Streptomyces species
Suttonella (Kingella) indologenes
Tatumella ptyseos
Tetragenococcus (Pediococcus)
halophilus
Torulaspora delbrueckii
(Saccharomyces rosei)
Torulopsis candida
Torulopsis haemulonii
Torulopsis inconspicua
Treponema species
Trichosporon asahii
Trichosporon asteroides
Trichosporon beigelii
Trichosporon cutaneum
Trichosporon inkin
Trichosporon mucoides
Trichosporon ovoides
Trichosporon pullulans
Trichosporon species
Turicella otitidis
Ureaplasma species
Ureaplasma urealyticum
Veillonella parvula (V. alcalescens)
Veillonella species
Vibrio alginolyticus
Vibrio cholerae
Vibrio damsela
Vibrio fluvialis
Vibrio furnissii
Vibrio harveyi
Vibrio hollisae
Vibrio metschnikovii
Vibrio mimicus
Vibrio parahaemolyticus
Vibrio species
Vibrio species SF
Vibrio vulnificus
Weeksella (Bergeylla) virosa
Weeksella species
Weeksella virosa
Williopsis (Hansenula) satumus
Xanthomonas campestris
Xanthomonas species
Yarrowia (Candida) lipolytica
Yersinia aldovae
Yersinia enterocolitica
Yersinia enterocolitica group
Yersinia frederiksenii
Yersinia intermedia
Yersinia intermedius
Yersinia kristensenii
Yersinia pestis
Yersinia pseudotuberculosis
Yersinia pseudotuberculosis SF
Yersinia ruckeri
Yersinia species
Yokenella regensburgei
Yokenella regensburgei (Koserella
trabulsii)
Zygoascus hellenicus
Zygosaccharomyces species
¹The list includes microorganisms that may be identified by API identification test systems and VITEK ® automated identification system from bioMérieux Inc., or by the MicroScan ®-WalkAway ® automated systems from Dade Behring. Identification relies on classical identification methods using batteries of biochemical and other phenotypical tests.

TABLE 16
tuf gene sequences obtained in our laboratory (Example 42).

| | | | GenBank |
|---|---|---|---|
| Species | Strain no. | Gene | Accession no.* |
| Abiotrophia adiacens | ATCC49175 | tuf | AF124224 |
| Enterococcus avium | ATCC14025 | tufA | AF124220 |
| | | tufB | AF274715 |
| Enterococcus casseliflavus | ATCC25788 | tufA | AF274716 |
| | | tufB | AF274717 |
| Enterococcus cecorum | ATCC43198 | tuf | AF274718 |
| Enterococcus columbae | ATCC51263 | tuf | AF274719 |
| Enterococcus dispar | ATCC51266 | tufA | AF274720 |
| | | tufB | AF274721 |
| Enterococcus durans | ATCC19432 | tufA | AF274722 |
| | | tufB | AF274723 |
| Enterococcus faecalis | ATCC29212 | tuf | AF124221 |
| Enterococcus faecium | ATCC 19434 | tufA | AF124222 |
| | | tufB | AF274724 |
| Enterococcus gallinarum | ATCC49573 | tufA | AF124223 |
| | | tufB | AF274725 |
| Enterococcus hirae | ATCC8043 | tufA | AF274726 |
| | | tufB | AF274727 |
| Enterococcus malodoratus | ATCC43197 | tufA | AF274728 |
| | | tufB | AF274729 |
| Enterococcus mundtii | ATCC43186 | tufA | AF274730 |
| | | tufB | AF274731 |
| Enterococcus pseudoavium | ATCC49372 | tufA | AF274732 |
| | | tufB | AF274733 |
| Enterococcus raffinosus | ATCC49427 | tufA | AF274734 |
| | | tufB | AF274735 |
| Enterococcus saccharolyticus | ATCC43076 | tuf | AF274736 |
| Enterococcus solitarius | ATCC49428 | tuf | AF274737 |
| Enterococcus sulfureus | ATCC49903 | tuf | AF274738 |
| Lactococcus lactis | ATCC11154 | tuf | AF274745 |
| Listeria monocytogenes | ATCC15313 | tuf | AF274746 |
| Listeria seeligeri | ATCC35967 | tuf | AF274747 |
| Staphylococcus aureus | ATCC25923 | tuf | AF274739 |
| Staphylococcus epidermidis | ATCC14990 | tuf | AF274740 |
| Streptococcus mutans | ATCC25175 | tuf | AF274741 |
| Streptococcus pneumoniae | ATCC6303 | tuf | AF274742 |
| Streptococcus pyogenes | ATCC19615 | tuf | AF274743 |
| Streptococcus suis | ATCC43765 | tuf | AF274744 |

*Corresponding sequence ID NO. for the above ATCC strains are given in table 7.

TABLE 17
tuf gene sequences selected from databases for Example 42.

| Species | Gene | Accession no.* |
|---|---|---|
| Agrobacterium tumefaciens | tufA | X99673 |
| | tufB | X99674 |
| Anacystis nidulans | tuf | X17442 |
| Aquifex aeolicus | tufA | AE000657 |
| | tufB | AE000657 |
| Bacillus stearothermophilus | tuf | AJ000260 |
| Bacillus subtilis | tuf | AL009126 |
| Bacteroides fragilis | tuf | P33165 |
| Borrelia burgdorferi | tuf | AE000783 |
| Brevibacterium linens | tuf | X76863 |
| Bulkholderia cepacia | tuf | P33167 |
| Campylobacter jejuni | tufB | Y17167 |
| Chlamydia pneumoniae | tuf | AE001363 |
| Chlamydia trachomatis | tuf | M74221 |
| Corynebacterium glutamicum | tuf | X77034 |
| Cytophaga lytica | tuf | X77035 |
| Deinococcus radiodurans | tuf | AE000513 |
| Escherichia coli | tufA | J01690 |
| | tufB | J01717 |
| Fervidobacterium islandicum | tuf | Y15788 |
| Haemophilus influenzae | tufA | L42023 |
| | tufB | L42023 |
| Helicobacter pylori | tuf | AE000511 |
| Homo sapiens (Human) | EF-1α | X03558 |
| Methanococcus jannaschii | EF-1α | U67486 |
| Mycobacterium leprae | tuf | D13869 |
| Mycobacterium tuberculosis | tuf | X63539 |
| Mycoplasma genitalium | tuf | L43967 |
| Mycoplasma pneumoniae | tuf | U00089 |
| Neisseria gonorrhoeae | tufA | L36380 |
| Nicotiana tabacum (Tobacco) | EF-1α | U04632 |
| Peptococcus niger | tuf | X76869 |
| Planobispora rosea | tuf1 | U67308 |
| Saccharomyces cerevisiae (Yeast) | EF-1α | X00779 |
| Salmonella typhimurium | tufA | X55116 |
| | tufB | X55117 |
| Shewanella putrefaciens | tuf | P33169 |
| Spirochaeta aurantia | tuf | X76874 |
| Spirulina platensis | tufA | X15646 |
| Streptomyces aureofaciens | tuf1 | AF007125 |
| Streptomyces cinnamoneus | tuf1 | X98831 |
| Streptomyces coelicolor | tuf1 | X77039 |
| | tuf3 | X77040 |
| Streptomyces collinus | tuf1 | S79408 |
| Streptomyces ramocissimus | tuf1 | X67057 |
| | tuf2 | X67058 |
| | tuf3 | X67059 |
| Synechocystis sp. | tuf | AB001339 |
| Taxeobacter ocellatus | tuf | X77036 |
| Thermotoga maritima | tuf | AE000512 |
| Thermus aquaticus | tuf | X66322 |
| Thermus thermophilus | tuf | X06657 |
| Thiobacillus cuprinus | tuf | U78300 |
| Treponema pallidum | tuf | AE000520 |
| Wolinella succinogenes | tuf | X76872 |

*Sequence data were obtained from GenBank, EMBL, and SWISSPROT databases. Genes were designated as appeared in the references.

TABLE 18
Nucleotide and amino acid sequence identities of EF-Tu between different enterococci and other low G + C gram-positive bacteria.

[chemical structure]

The upper right triangle represents the deduced amino acid sequence identities of gram-positive bacterial EF-Tu, while the lower left triangle represents the DNA sequence identities of the corresponding tuf genes. The sequence identities between different enterococcal tufA genes are boxed while those between enterococcal tufB genes are shaded.

TABLE 19
Strains analyzed in Example 43.

| | | | 16S rDNA |
|---|---|---|---|
| | | | sequence |
| | | | accession |
| Taxon | Strain* | Strain† | number |
| Cedecea davisae | ATCC 33431^{T} | | |
| Cedecea lapagei | ATCC 33432^{T} | | |
| Cedecea neteri | ATCC 33855^{T} | | |
| Citrobacter amalonaticus | ATCC 25405^{T} | CDC 9020-77^{T} | AF025370 |
| Citrobacter braakii | ATCC 43162 | CDC 080-58^{T} | AF025368 |
| Citrobacter farmeri | ATCC 51112^{T} | CDC 2991-81^{T} | AF025371 |
| Citrobacter freundii | ATCC 8090^{T} | DSM 30039^{T} | AJ233408 |
| Citrobacter koseri | ATCC 27156^{T} | | |
| Citrobacter sedlakii | ATCC 51115^{T} | CDC 4696-86^{T} | AF025364 |
| Citrobacter werkmanii | ATCC 51114^{T} | CDC 0876-58^{T} | AF025373 |
| Citrobacter youngae | ATCC 29935^{T} | | |
| Edwardsiella hoshinae | ATCC 33379^{T} | | |
| Edwardsiella tarda | ATCC 15947^{T} | CDC 4411-68 | AF015259 |
| Enterobacter aerogenes | ATCC 13048^{T} | JCM 1235^{T} | AB004750 |
| Enterobacter agglomerans | ATCC 27989 | | |
| Enterobacter amnigenus | ATCC 33072^{T} | JCM 1237^{T} | AB004749 |
| Enterobacter asburiae | ATCC 35953^{T} | JCM 6051^{T} | AB004744 |
| Enterobacter cancerogenus | ATCC 35317^{T} | | |
| Enterobacter cloacae | ATCC 13047^{T} | | |
| Enterobacter gergoviae | ATCC 33028^{T} | JCM 1234^{T} | AB004748 |
| Enterobacter hormaechei | ATCC 49162^{T} | | |
| Enterobacter sakazakii | ATCC 29544^{T} | JCM 1233^{T} | AB004746 |
| Escherichia coli | ATCC 11775^{T} | ATCC 11775^{T} | X80725 |
| Escherichia coli | ATCC 25922 | ATCC 25922 | X80724 |
| Escherichia coli (ETEC) | ATCC 35401 | | |
| Escherichia coli (O157:H7) | ATCC 43895 | ATCC 43895 | Z83205 |
| Escherichia fergusonii | ATCC 35469^{T} | | |
| Escherichia hermanii | ATCC 33650^{T} | | |
| Escherichia vulneris | ATCC 33821^{T} | ATCC 33821^{T} | X80734 |
| Ewingella americana | ATCC 33852^{T} | NCPPB 3905 | X88848 |
| Hafnia alvei | ATCC 13337^{T} | ATCC 13337^{T} | M59155 |
| Klebsiella ornithinolytica | ATCC 31898 | CIP 103.364 | U78182 |
| Klebsiella oxytoca | ATCC 33496 | ATCC 13182^{T} | U78183 |
| Klebsiella planticola | ATCC 33531^{T} | JCM 7251^{T} | AB004755 |
| Klebsiella pneumoniae | | | |
| subsp. pneumoniae | ATCC 13883^{T} | DSM 30104^{T} | AJ233420 |
| subsp. ozaenae | ATCC 11296^{T} | ATCC 11296^{T} | Y17654 |
| subsp. rhinoscleromatis | ATCC 13884^{T} | | |
| Kluyvera ascorbata | ATCC 33433^{T} | ATCC 14236 | Y07650 |
| Kluyvera cryocrescens | ATCC 33435^{T} | | |
| Kluyvera georgiana | ATCC 51603^{T} | | |
| Leclercia adecarboxylata | ATCC 23216^{T} | | |
| Leminorella grimontii | ATCC 33999^{T} | DSM 5078^{T} | AJ233421 |
| Moellerella wisconsensis | ATCC 35017^{T} | | |
| Morganella morganii | ATCC 25830^{T} | | |
| Pantoea agglomerans | ATCC 27155^{T} | DSM 3493^{T} | AJ233423 |
| Pantoea dispersa | ATCC 14589^{T} | | |
| Plesiomonas shigelloides | ATCC 14029^{T} | | |
| Pragia fontium | ATCC 49100^{T} | DSM 5563^{T} | AJ233424 |
| Proteus mirabilis | ATCC 25933 | | |
| Proteus penneri | ATCC 33519^{T} | | |
| Proteus vulgaris | ATCC 13315^{T} | DSM 30118^{T} | AJ233425 |
| Providencia alcalifaciens | ATCC 9886^{T} | | |
| Providencia rettgeri | ATCC 9250 | | |
| Providencia rustigianii | ATCC 33673^{T} | | |
| Providencia stuartii | ATCC 33672 | | |
| Rahnella aquatilis | ATCC 33071^{T} | DSM 4594^{T} | AJ233426 |
| Salmonella choleraesuis | | | |
| subsp. arizonae | ATCC 13314^{T} | | |
| subsp. choleraesuis | | | |
| serotype Choleraesuis | ATCC 7001 | | |
| serotype Enteritidis‡ | ATCC 13076^{T} | SE22 | SE22 |
| serotype Gallinarum | ATCC 9184 | | |
| serotype Heidelberg | ATCC 8326 | | |
| serotype Paratyphi A | ATCC 9150 | | |
| serotype Paratyphi B | ATCC 8759 | | |
| serotype Typhi‡ | ATCC 10749 | St111 | U88545 |
| serotype Typhimurium‡ | ATCC 14028 | | |
| serotype Virchow | ATCC 51955 | | |
| subsp. diarizonae | ATCC 43973^{T} | | |
| subsp. houtenae | ATCC 43974^{T} | | |
| subsp. indica | ATCC 43976^{T} | | |
| subsp. salamae | ATCC 43972^{T} | | |
| Serratia fonticola | DSM 4576^{T} | DSM 4576^{T} | AJ233429 |
| Serratia grimesii | ATCC 14460^{T} | DSM 30063^{T} | AJ233430 |
| Serratia liquefaciens | ATCC 27592^{T} | | |
| Serratia marcescens | ATCC 13880^{T} | DSM 30121^{T} | AJ233431 |
| Serratia odorifera | ATCC 33077^{T} | DSM 4582^{T} | AJ233432 |
| Serratia plymuthica | DSM 4540^{T} | DSM 4540^{T} | AJ233433 |
| Serratia rubidaea | DSM 4480^{T} | DSM 4480^{T} | AJ233436 |
| Shigella boydii | ATCC 9207 | ATCC 9207 | X96965 |
| Shigella dysenteriae | ATCC 11835 | ATCC 13313^{T} | X96966 |
| | | ATCC 25931 | X96964 |
| Shigella flexneri | ATCC 12022 | ATCC 12022 | X96963 |
| Shigella sonnei | ATCC 29930^{T} | | |
| Tatumella ptyseos | ATCC 33301^{T} | DSM 5000^{T} | AJ233437 |
| Trabulsiella guamensis | ATCC 49490^{T} | | |
| Yersinia enterocolitica | ATCC 9610^{T} | ATCC 9610^{T} | M59292 |
| Yersinia frederiksenii | ATCC 33641^{T} | | |
| Yersinia intermedia | ATCC 29909^{T} | | |
| Yersinia pestis | RRB KIMD27 | ATCC 19428^{T} | X75274 |
| Yersinia pseudotuberculosis | ATCC 29833^{T} | | |
| Yersinia rohdei | ATCC 43380^{T} | ER-2935^{T} | X75276 |
| Shewanella putrefaciens | ATCC 8071^{T} | | |
| Vibrio cholerae | ATCC 25870 | ATCC 14035^{T} | X74695 |

T Type strain
*Strains used in this study for sequencing of partial tuf and atpD genes. SEQ ID NOs. for tuf and atpD sequences corresponding to the above reference strains are given in table 7.
†Strains used in other studies for sequencing of 16S rDNA gene. When both strain numbers are on the same row, both strains are considered to be the same although strain numbers may be different.
‡Phylogenetic serotypes considered species by the Bacteriological Code (1990 Revision).

TABLE 20
PCR primer pairs used in this study

| Primer | | Nucleotide | Amplicon |
|---|---|---|---|
| SEQ ID NO. | Sequence | positions* | length (bp) |
| tuf | | | |
| 664 | 5′-AAYATGATIACIGGIGCIGCICARATGGA-3′ | 271-299 | 884 |
| 697 | 5′-CCIACIGTICKICCRCCYTCRCG-3′ | 1132-1156 | |
| atpD | | | |
| 568 | 5′-RTIATIGGIGCIGTIRTIGAYGT-3′ | 25-47 | 884 |
| 567 | 5′-TCRTCIGCIGGIACRTAIAYIGCYTG-3′ | 883-908 | |
| 700 | 5′-TIRTIGAYGTCGARTTCCCTCARG-3′ | 38-61 | 871 |
| 567 | 5′-TCRTCIGCIGGIACRTAIAYIGCYTG-3′ | 883-908 | |

*The nudeotide positions given are for E. coli tuf and atpD sequences (GenBank accession no. AE000410 and V00267, respectively). Numbering starts from the first base of the initiation codon.

TABLE 21

Selection of M. catarrhalis-specific primer pairs from SEQ ID NO:29¹
(466 pb DNA fragment) other than those previously tested².

| | | | Mor- | Mor- | Mor- | | | | | | | | | | | |
|---|---|---|---|---|---|---|---|---|---|---|---|---|---|---|---|---|
| | | | ax- | ax- | ax | | | | Mor- | | | | | | | |
| | | | ella | ella | ella | | | | ax- | King- | | Neiss- | | | Staph- | |
| | | Amp- | cat- | cat- | non- | Mor- | Mor- | Mor- | ella | ella | eria | Neiss- | | ylo- | | |
| | | li- | arr- | arr- | li- | ax- | ax- | ax- | phen- | in- | King- | men- | eria | Esc- | coc- | |
| | | con | halis | halis | que- | ella | ella | ella | yl- | do- | ella | in- | gon- | her- | cus | |
| | | size | ATCC | ATCC | fac- | lacu- | oslo- | atla- | pyru- | lo- | king- | giti- | orr- | ichia | aur- | |
| Primer | Sequence | (bp) | 43628 | 53879 | iens | nata | ensis | ntae | vica | genes | ea | dis | hoeae | coli | eus | |
| SEQ ID | CGCTGACG | 118 | +³ | + | − | − | − | − | − | − | − | − | − | − | − | |
| NO:118 | GCTTGTTT | | | | | | | | | | | | | | | |
| | GTACCA | | | | | | | | | | | | | | | |
| SEQ ID | TGTTTTGA | | | | | | | | | | | | | | | |
| NO;119 | GCTTTTTA | | | | | | | | | | | | | | | |
| | TTTTTTGA | | | | | | | | | | | | | | | |
| VB | TGCTTAAG | 93 | + | + | − | − | − | − | − | − | − | − | − | − | − | |
| mcat1 | ATTCACTC | | | | | | | | | | | | | | | |
| | TGCCATTT | | | | | | | | | | | | | | | |
| | T | | | | | | | | | | | | | | | |
| VB | TAAGTCGC | | | | | | | | | | | | | | | |
| mcat2 | TGACGGCT | | | | | | | | | | | | | | | |
| | TGTTT | | | | | | | | | | | | | | | |
| VB | CCTGCACC | 140 | + | + | − | − | − | − | − | − | − | − | − | − | − | |
| mcat3 | ACAAGTCA | | | | | | | | | | | | | | | |
| | TCAT | | | | | | | | | | | | | | | |
| VB | AATTCACC | | | | | | | | | | | | | | | |
| mcat4 | AACAATGT | | | | | | | | | | | | | | | |
| | CAAAGC | | | | | | | | | | | | | | | |
| VB | AATGATAA | 219 | + | + | − | − | − | − | − | − | − | − | − | − | − | |
| mcat5 | CCAGTCAA | | | | | | | | | | | | | | | |
| | GCAAGC | | | | | | | | | | | | | | | |
| VB | GGTGCATG | | | | | | | | | | | | | | | |
| mcat6 | GTGATTTG | | | | | | | | | | | | | | | |
| | TAAAA | | | | | | | | | | | | | | | |
| VB | GTGTGCG160 | 160 | + | + | − | − | − | − | − | − | − | − | − | − | − | T |
| mcat7 | TCACTTTT | | | | | | | | | | | | | | | |
| | ACAAAT | | | | | | | | | | | | | | | |
| VB | GGTGTTAA | | | | | | | | | | | | | | | |
| mcat8 | GCTGATGA | | | | | | | | | | | | | | | |
| | TGAGAG | | | | | | | | | | | | | | | |
| VB | TGACCATG | 167 | + | + | − | − | − | − | − | − | − | − | − | − | − | |
| mcat9 | CACACCCT | | | | | | | | | | | | | | | |
| | TATT | | | | | | | | | | | | | | | |
| VB | TCATTGGG | | | | | | | | | | | | | | | |
| mcat10 | ATGAAAGT | | | | | | | | | | | | | | | |
| | ATCGTT | | | | | | | | | | | | | | | |

¹SEQ ID NO. from U.S. pat. 6,001,564.
²All PCR assays were performed with 1 ng of purified genomic DNA by using an annealing temperature of 55° C. and 30 cycles of amplification. The genomic DNA from the various bacterial species above was always isolated from reference strains obtained from ATCC.
³All positive results showed a strong amplification signal with genomic DNA from the target species M. catarrhalis.

TABLE 22

Selection of S. epidermidis-speciflc primer pairs from SEQ ID NO:36¹
(705 pb DNA fragment) other than those previously tested.

| | | | Staphyl- | Staphyl- | | | | | |
|---|---|---|---|---|---|---|---|---|---|
| | | | ococcus | ococcus | | | | | |
| | | Ampli- | epiderm- | epiderm- | | | | Staphyl- | |
| | | con | idis, | idis, | Staphyl- | Staphyl- | Staphyl- | ococcus | |
| | Sequence | size | ATCC | ATCC | ococcus | ococcus | ococcus | auri- | Staphyl- |
| Primer | (all 25 nucleotides) | (bp) | 14990 | 12228 | capitis | cohnii | aureus | cularis | ococcus |
| SEQ ID NO:145 | ATCAAAAAGTTGGCGAACCTTTTCA | 125 | +³ | + | − | − | − | − | − |
| SEQ ID NO:146 | CAAAAGAGCGTGGAGAAAAGTATCA | | | | | | | | |
| VBsep3 | CATAGTCTGATTGCTCAAAGTCTTG | 208 | + | + | − | − | − | − | + |
| VBsep4 | GCGAATAGTGAACTACATTCTGTTG | | + | + | − | − | − | − | − |
| VBsep5 | CACGCTCTTTTGCAATTTCCATTGA | 208 | + | + | + | + | + | − | + |
| VBsep6 | GAAGCAAATATTCAAAATGCACCAG | | + | + | + | + | + | − | + |
| VBsep7 | AAAGTCTTTTGCTTCTTCAGATTCA | 177 | + | + | − | − | − | − | + |
| VBsep8 | GTGTTCACAGGTATGGATGCTCTTA | | + | + | NT | NT | − | NT | − |
| | | | + | + | NT | NT | − | NT | − |
| VBsep9 | GAGCATCCATACCTGTGAACACAGA | 153 | + | + | − | − | − | − | + |
| VBsep10 | TTTTCCAATTACAAGAGACATCAGT | | + | + | NT | NT | − | NT | + |
| | | | + | + | NT | NT | − | NT | − |
| VBsep11 | TTTGAATTCGCATGTACTTTGTTTG | 135 | + | + | − | − | − | − | − |
| VBsep12 | CCCCGGGTTCGAAATCGATAAAAAG | | | | | | | | |
| | | Ampli- | | | | | | | |
| | | con | Staphyl- | | | Staphyl- | Staphyl- | Bacillus | Entero- |
| | Sequence | size | ococcus | Staphyl- | Stahyl- | ococcus | occoccus | stub- | coccus |
| Primer | (all 25 nucleotides) | (bp) | hominis | ococcus | ococcus | simulans | warneri | tilis | faecalis |
| SEQ ID NO:145 | ATCAAAAAGTTGGCGAACCTTTTCA | 125 | − | − | − | − | − | − | − |
| SEQ ID NO:146 | CAAAAGAGCGTGGAGAAAAGTATCA | | | | | | | | |
| VBsep3 | CATAGTCTGATTGCTCAAAGTCTTG | 208 | − | − | − | − | − | − | − |
| VBsep4 | GCGAATAGTGAACTACATTCTGTTG | | − | − | − | − | − | − | − |
| VBsep5 | CACGCTCTTTTGCAATTTCCATTGA | 208 | + | − | − | − | − | − | − |
| VBsep6 | GAAGCAAATATTCAAAATGCACCAG | | + | − | − | − | NT | NT | NT |
| VBsep7 | AAAGTCTTTTGCTTCTTCAGATTCA | 177 | − | − | − | + | − | − | − |
| VBsep8 | GTGTTCACAGGTATGGATGCTCTTA | | NT | − | − | + | NT | NT | NT |
| | | | NT | − | − | − | NT | NT | NT |
| VBsep9 | GAGCATCCATACCTGTGAACACAGA | 153 | − | + | + | − | − | − | − |
| VBsep10 | TTTTCCAATTACAAGAGACATCAGT | | NT | + | − | − | NT | NT | NT |
| | | | NT | − | − | − | NT | NT | NT |
| VBsep11 | TTTGAATTCGCATGTACTTTGTTTG | 135 | − | − | − | − | − | − | − |
| VBsep12 | CCCCGGGTTCGAAATCGATAAAAAG | | | | | | | | |
| | | | | | | | | | Anneal- |
| | | Ampli- | | Entero- | | Strepto- | Strepto- | | ing |
| | | con | Entero- | coccus | Listeria | coccus | coccus | Strepto- | temper- |
| | Sequence | size | coccus | galli- | monocy- | agala- | pneu | coccus | ature |
| Primer | (all 25 nucleotides) | (bp) | faecium | narum | togenes | ctiae | moniae | pyogenes | (° C.) |
| SEQ ID NO:145 | ATCAAAAAGTTGGCGAACCTTTTCA | 125 | − | − | − | − | − | − | 55 |
| SEQ ID NO:146 | CAAAAGAGCGTGGAGAAAAGTATCA | | | | | | | | |
| VBsep3 | CATAGTCTGATTGCTCAAAGTCTTG | 208 | − | − | − | − | − | − | 55 |
| VBsep4 | GCGAATAGTGAACTACATTCTGTTG | | − | − | − | − | − | − | 60 |
| VBsep5 | CACGCTCTTTTGCAATTTCCATTGA | 208 | − | − | − | − | − | − | 55 |
| VBsep6 | GAAGCAAATATTCAAAATGCACCAG | | NT | NT | NT | NT | NT | NT | 65 |
| VBsep7 | AAAGTCTTTTGCTTCTTCAGATTCA | 177 | − | − | − | − | − | − | 55 |
| VBsep8 | GTGTTCACAGGTATGGATGCTCTTA | | NT | NT | NT | NT | NT | NT | 60 |
| | | | NT | NT | NT | NT | NT | NT | 65 |
| VBsep9 | GAGCATCCATACCTGTGAACACAGA | 153 | − | − | − | − | − | − | 55 |
| VBsep10 | TTTTCCAATTACAAGAGACATCAGT | | NT | NT | NT | NT | NT | NT | 60 |
| | | | NT | NT | NT | NT | NT | NT | 65 |
| VBsep11 | TTTGAATTCGCATGTACTTTGTTTG | 135 | − | − | − | − | − | − | 60 |
| VBsep12 | CCCCGGGTTCGAAATCGATAAAAAG | | | | | | | | |

¹SEQ ID NO. from U.S. pat. 6.001.564.
²All PCR assays were performed with 1 ng of purified genomic DNA by using an anneaiing temperature of 55 to 65° C. and 30 cycles of amplification. The genomic DNA from the barious bacterial species above was always isolated from reference strains obtained from ATCC.
³All positive results showed a strong amplification signal with genomic DNA from the target species S. epidermidis. The instensity of the positive amplification signal with species other than S. epidermidis was variable.
NT = NOT TESTED.

TABLE 23
Influence of nucleotide variation(s) on the efficiency of the PCR amplification:
Example with SEQ ID NO: 146 from S. epidermidis.

[chemical structure]

¹All PCR tests were performed with SEQ ID NO: 145 without modification combined with SEQ ID NO: 146 or 13 modified versions of SEQ ID NO: 146. Boxed nucleotides indicate changes in SEQ ID NO: 146. All SEQ ID NOs. are from US patent 6,001,564.
²The tests with S. epidermidis were performed by using an annealing temperature of 55° C. with 1, 0,1 and 0,01 ng of purified genomic DNA or at 50° C. with 1 ng of purified genomic DNA.
³The tests with S. aureus were performed only at 50° C. with 1 ng of genomic DNA.
⁴The intensity of the positive amplification signal was quantified as follows: 3+ = strong signal, 2+ = intermediate signal and + = weak signal.

TABLE 24

Effect of the primer length on the efficiency of the PCR amplification^{1:}
Example with the AT-rich SEQ ID NO:145² and SEQ ID NO:146² from S. epidermidis.

| | | | | |
|---|---|---|---|---|
| | | | Staph- | Staph- |
| Staphylococcus | | Staphyl- | ylo- | ylo- |
| epidermidis³ | Staphyl- | ococcus | coccus | coccus |
| ATCC 14990 | ococcus | haemo- | cap- | warn- |

| | | | | | | |
|---|---|---|---|---|---|---|
| Length | 45° C. | 55° C. | aureus | lyticus | itis | eri |

| | | | | | | | | | | | | | | | | |
|---|---|---|---|---|---|---|---|---|---|---|---|---|---|---|---|---|
| Primer | Sequence | (nt) | 1 | 0,1 | 0,01 | 1 | 0,1 | 0,01 | 45 | 55 | 45 | 55 | 45 | 55 | 45 | 55 |

| | | | | | | | | | | | | | | | | |
|---|---|---|---|---|---|---|---|---|---|---|---|---|---|---|---|---|
| VBsep301 | ATATCATCAAAAAGTTGGCGAACCTTTTCA | 30 | NT | NT | NT | 4+ | 3+ | 2+ | NT | − | NT | − | NT | − | NT | − |
| VBsep302 | AATTGCAAAAGAGCGTGGAGAAAAGTATCA | 30 | | | | | | | | | | | | | | |
| SEQ ID NO:145 | ATCAAAAAGTTGGCGAACCTTTTCA | 25 | 4+⁵ | 3+ | 2+ | 4+ | 3+ | 2+ | − | − | − | − | + | | | |
| SEQ ID NO:146 | CAAAAGAGCGTGGAGAAAAGTATCA | 25 | | | | | | | | | | | | | | |
| VBsep201 | AAAGTTGGCGAACCTTTTCA | 20 | NT | NT | NT | 4+ | 3+ | 2+ | NT | − | NT | − | NT | − | NT | − |
| VBsep202 | GAGCGTGGAGAAAAGTATCA | 20 | | | | | | | | | | | | | | |
| VBsep171 | GTTGGCGAACCTTTTCA | 17 | 4+ | 3+ | 2+ | 3+ | 2+ | + | − | − | − | − | − | − | − | − |
| VBsep172 | CGTGGAGAAAAGTATCA | 17 | | | | | | | | | | | | | | |
| VBsep151 | TGGCGAACCTTTTCA | 15 | 3+ | 2+ | + | − | − | − | − | − | − | − | − | − | − | − |
| VBsep152 | TGGAGAAAAGTATCA | 15 | | | | | | | | | | | | | | |

¹All PCR tests were performed using an annealing temperature of 45 or 55° C. and 30 cycles of amplification.
²All SEQ ID NOs. in this Table are from U.S. pat. 6001,546.
³The tests with S. epidermidis were made with 1, 0,1 and 0,01 ng of purified genomic DNA.
⁴The tests with all other bacterial species were made only with 1 ng of purified genomic DNA.
⁵The intensity of the positive amplification signal was quantified as follows: 4+ = very strong signal, 3+ = strong signal, 2+ = intermediate signal and + = weak signal.
NT = not tested.

TABLE 25

Effect of the primer length on the efficiency of the PCR amplification¹:
Example with the GC-rich SEQ ID NO:83² and SEQ ID NO:84² from P. aeruginosa.

| | | | | | | | |
|---|---|---|---|---|---|---|---|
| | | | | | Steno- | | |
| | Pseudomonas | Pseuod- | | | otrop- | | Haemo- |
| | aeruginosa³ | monas | Burk- | Shew | homonas | Neisseria | philus |
| length | ATCC 35554 | fluore- | holderia | nella | matto- | mening- | parahae- |

| | | | | | | | | | | | |
|---|---|---|---|---|---|---|---|---|---|---|---|
| Primer | Sequence | (nt) | 1 | 0,1 | 0,01 | scens⁴ | cepacia | putida | philia | itidis | molyticus |

| | | | | | | | | | | | |
|---|---|---|---|---|---|---|---|---|---|---|---|
| SEQ ID NO 83 | CGAGCGGGTGGTGTTCATC | 19 | 2+⁵ | + | − | − | − | − | − | − | − |
| SEQ ID NO 84 | CAAGTCGTCGTCGGAGGGA | 19 | | | | | | | | | |
| Pse554-16a | CGAGCGGGTGGTGTTC | 16 | 2+ | + | − | − | − | − | − | − | − |
| Pse674-16a | GTCGTCGTCGGAGGGA | 16 | | | | | | | | | |
| Pse554-13b | GCGGGTGGTGTTC | 13 | 2+ | + | − | − | − | − | − | − | − |
| Pse674-13a | GTCGTCGGAGGGA 13 | | | | | | | | | | |

¹All PCR tests were performed using an annealing temperature of 55° C. and 30 cycles of amplification.
²All SEQ ID NOs. in this Table are fmm U.S. pat. 6,001,546.
³The tests with P. aeruginosa were made with 1, 0,1 and 0,01 ng of purified genomic DNA.
⁴The tests with all other bacterial species were made only with 1 ng of purified genomic DNA.
⁵The intensity of the positive amplification signal was quantified as follows: 2+ = strong signal and + = moderately strong signal.

ANNEX I
Specific and ubiquitous primers for nucleic acid amplification (tuf sequences).

Originating DNA fragment

| | | | |
|---|---|---|---|
| | | | Nucleotide |
| SEQ ID NO. | Nucleotide sequence | SEQ ID NO. | position |

| | | | |
|---|---|---|---|
| Bacterial species: | Acinetobacter baumannii | | |
| 1692 | 5′-GGT GAG AAC TGT GGT ATC TTA CTT | 1 | 478-501 |
| 1693^{a} | 5′-CAT TTC AAC GCC TTC TTT CAA CTG | 1 | 691-714 |
| Bacterial species: | Chlamydia pneumoniae | | |
| 630 | 5′-CGG AGC TAT CCT AGT CGT TTC A | 20 | 2-23 |
| 629^{a} | 5′-AAG TTC CAT CTC AAC AAG GTC AAT A | 20 | 146-170 |
| 2085 | 5′-CAA ACT AAA GAA CAT ATC TTG CTA | 20 | 45-68 |
| 2086^{a} | 5′-ATA TAA TTT GCA TCA CCT TCA AG | 20 | 237-259 |
| 2087 | 5′-TCA GCT CGT GGG ATT AGG AGA G | 20 | 431-452 |
| 2088^{a} | 5′-AGG CTT CAC GCT GTT AGC CTG A | 20 | 584-605 |
| Bacterial species: | Chlamydia trachomatis | | |
| 554 | 5′-GTT CCT TAC ATC GTT GTT TTT CTC | 22 | 82-105 |
| 555^{a} | 5′-TCT CGA ACT TTC TCT ATG TAT CCA | 22 | 249-272 |
| Parasitical species: | Cryptosporidium parvum | | |
| 798 | 5′-TGG TTG TCC GAG CCG ATC GTT T | 865 | 158-179 |
| 804^{a} | 5′-CCT GGG ACG GCC TCT GGC AT | 865 | 664-683 |
| 799 | 5′-ACC TGT GAA TAC AAG CAA TCT | 865 | 280-300 |
| 805^{a} | 5′-CTC TTG TCC ATC TTA GCA GT | 865 | 895-914 |
| 800 | 5′-GAT GAA ATC TTC AAC GAA GTT GAT | 865 | 307-330 |
| 806^{a} | 5′-AGC ATC ACC AGA CTT GAT AAG | 865 | 946-966 |
| 801 | 5′-ACA ACA CCG AGA AGA TCC CA | 865 | 353-372 |
| 803^{a} | 5′-ACT TCA GTG GTA ACA CCA GC | 865 | 616-635 |
| 802 | 5′-TTG CCA TTT CTG GTT TCG TT | 865 | 377-396 |
| 807^{A} | 5′-AAA GTG GCT TCA AAG GTT GC | 865 | 981-1000 |
| Bacterial species: | Enterococcus faecium | | |
| 1696 | 5′-ATG TTC CTC TAG TTG CTG GA | 64 | 189-208 |
| 1697^{a} | 5′-TTT CTT CAG CAA TAC CAA CAA C | 64 | 422-443 |
| Bacterial species: | Klebsiella pneumoniae | | |
| 1329 | 5′-TGT AGA GCG CCG TAT CAT CAA AGT A | 103 | 352-377 |
| 1330^{a} | 5′-AGA TTC GAA CTT GCT GTG CGG G | 103 | 559-571 |

^{a}These sequences are from the complementary DNA strand of the sequence of the
originating fragment given in the Sequence Listing.

| | | | |
|---|---|---|---|
| Bacterial species: | Mycoplasma pneumoniae | | |
| 2093 | 5′-TGT TGG CAA TCG AAG ACA CC | 2097^{a} | 635-654 |
| 2094^{a} | 5′-TTC AAT TTC TTG ACC TAC TTT CAA | 2097^{a} | 709-732 |
| Bacterial species: | Neisseria gonorrhoeae | | |
| 551 | 5′-GAA GAA AAA ATC TTC GAA CTG GCT A | 126 | 256-280 |
| 552^{b} | 5′-TAC ACG GCC GGT GAC TAC G | 126 | 378-396 |
| 2173 | 5′-AAG AAA AAA TCT TCG AAC TGG CTA | 126 | 257-280 |
| 2174^{b} | 5′-TCT ACA CGG CCG GTG | 126 | 384-398 |
| 2175 | 5′-CCG CCA TAC CCC GTT T | 126 | 654-669 |
| 2176^{b} | 5′-CGG CAT TAC CAT TTC CAC ACC TTT | 126 | 736-759 |
| Bacterial species: | Pseudomonas aeruginosa | | |
| 1694 | 5′-AAG GCA AGG ATG ACA ACG GC | 153 | 231-250 |
| 1695^{b} | 5′-ACG ATT TCC ACT TCT TCC TGG | 153 | 418-438 |
| Bacterial species: | Streptococcus agalactiae | | |
| 549 | 5′-GAA CGT GAT ACT GAC AAA CCT TTA | 207-210^{c} | 308331d |
| 550^{b} | 5′-GAA GAA GAA CAC CAA CGT TG | 207-210^{c} | 520539d |
| Bacterial species: | Streptococcus pyogenes | | |
| 999 | 5′-TTG ACC TTG TTG ATG ACG AAG AG | 1002 | 143-165 |
| 1000^{b} | 5′-TTA GTG TGT GGG TTG ATT GAA CT | 1002 | 622-644 |
| 1001 | 5′-AAG AGT TGC TTG AAT TAG TTG AG | 1002 | 161-183 |
| 1000^{b} | 5′-TTA GTG TGT GGG TTG ATT GAA CT | 1002 | 622-644 |
| Parasitical species: | Trypanosoma brucei | | |
| 820 | 5′-GAA GGA GGT GTC TGC TTA CAC | 864 | 513-533 |
| 821^{b} | 5′-GGC GCA AAC GTC ACC ACA TCA | 864 | 789-809 |
| 820 | 5′-GAA GGA GGT GTC TGC TTA CAC | 864 | 513-533 |
| 822^{b} | 5′-CGG CGG ATG TCC TTA ACA GAA | 864 | 909-929 |

^{a}Sequence from databases.
^{b}These sequences are from the complementary DNA strand of the sequence of the
originating fragment given in the Sequence Listing.
^{c}These sequences were aligned to derive the corresponding primer.
^{d}The nucleotide positions refer to the S. agalactiae tuf sequence fragment
(SEQ ID NO. 209)

| | | | |
|---|---|---|---|
| Parasitical species: | Trypanosoma cruzi | | |
| 794 | 5′-GAC GAC AAG TCG GTG AAC TT | 840-842^{a} | 281-300^{c} |
| 795^{b} | 5′-ACT TGC ACG CGA TGT GGC AG | 840-842^{a} | 874-893^{c} |
| Bacterial genus: | Clostridium sp. | | |
| 796 | 5′-GGT CCA ATG CCW CAA ACW AGA | 32, 719- | |
| | | 724, 736^{a} | |
| 797^{b} | 5′-CAT TAA GAA TGG YTT ATC TGT SKC TCT | 32, 719- | 320-346^{d} |
| | | 724, 736^{a} | |
| 808 | 5′-GCI TTA IWR GCA TTA GAA RAY CCA | 32, 719- | 224-247^{d} |
| | | 724, 736^{a} | |
| 809^{b} | 5′-TCT TCC TGT WGC AAC TGT TCC TCT | 32,719- | 337-360^{d} |
| | | 724, 736^{a} | |
| 810 | 5′-AGA GMW ACA GAT AAR SCA TTC TTA | 32, 719- | 320-343^{d} |
| | | 724, 736a | |
| 811^{b} | 5′-TRA ART AGA ATT GTG GTC TRT ATC C | 32, 719- | 686-710^{d} |
| | | 724, 736^{a} | |
| Bacterial genus: | Corynebacterium sp. | | |
| 545 | 5′-TAC ATC CTB GTY GCI CTI AAC AAG TG | 34-44, 662^{a} | 89-114^{e} |
| 546^{b} | 5′-CCR CGI CCG GTR ATG GTG AAG AT | 34-44, 662^{a} | 350-372^{e} |
| Bacterial genus: | Enterococcus sp. | | |
| 656 | 5′-AAT TAA TGG CTG CAG TTG AYG A | 58-72^{a} | 273-294^{f} |
| 657^{b} | 5′-TTG TCC ACG TTC GAT RTC TTC A | 58-72^{a} | 556-577^{f} |
| 656 | 5′-ART TAA TGG CTG CAG TTG AYG A | 58-72^{a} | 273-294^{f} |
| 271^{b} | 5′-TTG TCC ACG TTG GAT RTC TTC A | 58-72^{a} | 556-577^{f} |
| 1137 | 5′-ART TAA TGG CTG CWG TTG AYG AR | 58-72^{a} | 273-295^{f} |
| 1136^{b} | 5-ACT TGT CCA CGT TSG ATR TCT | 58-72^{a} | 559-579^{f} |

^{a}These sequences were aligned to derive the corresponding primer.
^{b}These sequences are from the complementary DNA strand of the sequence of the
originating fragment given in the Sequence Listing.
^{c}The nucleotide positions refer to the T. cruzi tuf sequence fragment
(SEQ ID NO. 842)
^{d}The nucleotide positions refer to the C. perifringens tuf sequence fragment
(SEQ ID NO. 32).
^{e}The nucleotide positions refer to the C. diphtheriae tuf sequence fragment
(SEQ ID NO. 662)
^{f}The nucleotide positions refer to the E. durans tuf sequence fragment
(SEQ ID NO. 61).

| | | | |
|---|---|---|---|
| Bacterial genus: | Legionella sp. | | |
| 2081 | 5′-GRA TYR TYA AAG TTG GTG AGC AAG | 111-112^{a} | 411-434^{b} |
| 2O82^{c} | 5′-CMA CTT CAT CYC GCT TCG TAC C | 111-112^{a} | 548-569^{b} |
| Bacterial genus: | Staphylococcus sp. | | |
| 553 | 5′-GGC CGT GTT GAA CGT GGT CAA ATC A | 176-203^{a} | 313-337^{d} |
| 707^{c} | 5′-TIA CCA TTT CAG TAC CTT CTG GTA A | 176-203^{a} | 653-677^{d} |
| 553 | 5′-GGC CGT GTT GAA CGT GGT CAA ATC A | 176-203^{a} | 313-337^{d} |
| 707^{c} | 5′-TWA CCA TTT CAG TAC CTT CTG GTA A | 176-203^{a} | 653-677^{d} |
| Bacterial genus: | Streptococcus sp. | | |
| 547 | 5′-GTA CAG TTG CTT CAG GAC GTA TC | 206-231^{a} | 372-394^{e} |
| 548^{c} | 5′-ACG TTC GAT TTC ATC ACG TTG | 206-231^{a} | 548-568^{e} |
| Fungal genus: | Candida sp. | | |
| 576 | 5′-AAC TTC RTC AAG AAG GTY GCT TAC AA | 407-426, | 332-357^{f} |
| | | 428-432^{a} | |
| 632^{c} | 5′-CCC TTT GGT GGR TCS TKC TTG GA | 407-426, | 791-813^{f} |
| | | 428-432^{a} | |
| 631 | 5′-CAG ACC AAC YGA IAA RCC ATT RAG AT | 407-426, | 523-548^{f} |
| | | 428-432^{a} | |
| 632^{c} | 5′-CCC TTT GGT GGR TCS TKC TTG GA | 407-426, | 791-513^{f} |
| | | 428-432^{a} | |
| 633 | 5′-CAG ACC AAC YGA IAA RCC ITT RAG AT | 407-426, | 523-548^{f} |
| | | 428-432^{a} | |
| 632^{c} | 5′-CCC TTT GGT GGR TCS TKC TTG GA | 407-426, | 791-813^{f} |
| | | 428-432^{a} | |

^{a}These sequences were aligned to derive the corresponding primer.
^{b}The nucleotide positions refer to the L. pneumophila tuf sequence fragment
(SEQ ID NO. 112)
^{c}These sequences are from the complementary DNA strand of the sequence of the
originating fragment given in the Sequence Listing.
^{d}The nucleotide positions refer to the S. aureus tuf sequence fragment
(SEQ ID NO. 179)
^{e}The nucleotide positions refer to the S. agalactiae tuf sequence fragment
(SEQ ID NO. 209).
^{f}The nucleotide positions refer to the C. albicans tuf(EF-1) sequence fragment
(SEQ ID NO. 408)

| | | | |
|---|---|---|---|
| Fungal genus: | Cryptococcus sp. | | |
| 1971 | 5′-CYG ACT GYG CCA TCC TYA TCA | 434, 623, 1281, | 150-170^{b} |
| | | 1985, 1986^{a} | |
| 1973^{c} | 5′-RAC ACC RGI YTT GGW ITC CTT | 434, 623, 1281, | 464-484^{b} |
| | | 1985, 1986^{a} | |
| 1972 | 5′-MGI CAG CTC ATY ITT GCW KSC | 434, 623, 1281, | 260-280^{b} |
| | | 1985, 1986^{a} | |
| 1973^{c} | 5′-RAC ACC RGI YTT GGW ITC CTT | 434, 623, 1281, | 464-484^{b} |
| 1985, 1986^{a} | | | |
| Parasitical genus: | Entamoeba sp. | | |
| 703 | 5′-TAT GGA AAT TCG AAA CAT CT | 512 | 38-57 |
| 704^{c} | 5′-AGT GCT CCA ATT AAT GTT GG | 512 | 442-461 |
| 703 | 5′-TAT GGA AAT TCG AAA CAT CT | 512 | 38-57 |
| 705^{c} | 5′-GTA CAG TTC CAA TAC CTG AA | 512 | 534-553 |
| 703 | 5′-TAT GGA AAT TCG AAA CAT CT | 512 | 38-57 |
| 706^{c} | 5′-TGA AAT CTT CAC ATC CAA CA | 512 | 768-787 |
| 793 | 5′-TTA TTG TTG CTG CTG GTA CT | 512 | 149-168 |
| 704^{c} | 5′-AGT GCT CCA ATT AAT GTT GG | 512 | 442-461 |
| Parasitical genus: | Giardia sp. | | |
| 816 | 5′-GCT ACG ACG AGA TCA AGG GC | 513 | 305-324 |
| 819^{c} | 5′-TCG AGC TTC TGG AGG AAG AG | 513 | 895-914 |
| 817 | 5′-TGG AAG AAG GCC GAG GAG TT | 513 | 355-374 |
| 818^{c} | 5′-AGC CGG GCT GGA TCT TCT TC | 513 | 825-844 |
| Parasitical genus: | Leishmania sp. | | |
| 701 | 5′-GTG TTC ACG ATC ATC GAT GCG | 514-526^{a} | 94-114^{d} |
| 702^{c} | 5′-CTC TCG ATA TCC GCG AAG CG | 514-526^{a} | 913-932^{d} |

^{a}These sequences were aligned to derive the corresponding primer.
^{b}The nucleotide positions refer to the C. neoformans tuf (EF-1) sequence
fragment (SEQ ID NO. 623).
^{c}These sequences are from the complementary DNA strand of the sequence of the
originating fragment given in the Sequence Listing.
^{d}The nucleotide positions refer to the L. tropica tuf(EF-1) sequence fragment
(SEQ ID NO. 526)

| | | | |
|---|---|---|---|
| Parasitical genus: | Trypanosoma sp. | | |
| 823 | 5′-GAG CGG TAT GAY GAG ATT GT | 529, 840- | 493-512^{b} |
| | | 842, 864^{a} | |
| 824^{c} | 5′-GGC TTC TGC GGC ACC ATG CG | 529, 840- | 1171-1190^{b} |
| | | 842, 864^{b} | |
| Bacterial family: | Enterobacteriaceae | | |
| 933 | 5′-CAT CAT CGT ITT CMT GAA CAA RTG | 78, 103, 146, | 390-413^{d} |
| | | 168, 238, 698^{a} | |
| 934^{c} | 5′-TCA CGY TTR RTA CCA CGC AGI AGA | 78, 103, 146, | 831-854^{d} |
| | | 168, 238, 698^{a} | |
| Bacterial family: | Mycobacteriaceae | | |
| 539 | 5′-CCI TAC ATC CTB GTY GCI CTI AAC AAG | 122 | 85-111 |
| 540^{c} | 5′-GGD GCI TCY TCR TCG WAI TCC TG | 122 | 181-203 |
| Bacterial group: | Escherichia coli and Shigella | | |
| 1661 | 5′-TGG GAA GCG AAA ATC CTG | 1668^{e} | 283-300 |
| 1665^{c} | 5′-CAG TAG AGG TAG ACT TCT G | 1668^{e} | 484-502 |
| Bacterial group: | Pseudomonads group | | |
| 541 | 5′-GTK GAA ATG TTC CGC AAG CTG CT | 153-155^{a} | 476-498^{f} |
| 542^{c} | 5′-CGG AAR TAG AAC TGS GGA CGG TAG | 153-155^{a} | 679-702^{f} |
| 541 | 5′-GTK GAA ATG TTC CGC AAG CTG CT | 153-155^{a} | 476-498^{f} |
| 544^{c} | 5′-AYG TTG TCG CCM GGC ATT MCC AT | 153-155^{a} | 749-771^{f} |

^{a}These sequences were aligned to derive the corresponding primer.
^{b}The nucleotide positions refer to the T. brucei tuf (EF-1) sequence fragment
(SEQ ID NO. 864)
^{c}These sequences are from the complementary DNA strand of the sequence of the
originating fragment given in the Sequence Listing.
^{d}The nucleotide positions refer to the E. coli tuf sequence fragment
(SEQ ID NO. 698)
^{e}Sequence from databases.
^{f}The nucleotide positions refer to the P. aeruginosa tuf sequence fragment
(SEQ ID NO. 153)

| | | | |
|---|---|---|---|
| Parasitical group: | Trypanosomatidae family | | |
| 923 | 5′-GAC GCI GCC ATC CTG ATG ATC | 511, 514-526, | 166-188^{b} |
| | | 529, 840-842, | |
| | | 864^{a} | |
| 924 | 5′-ACC TCA GTC GTC ACG TTG GCG | 511, 514-526, | 648-668^{b} |
| | | 529, 840-842, | |
| | | 864^{a} | |
| 925 | 5′-AAG CAG ATG GTT GTG TGC TG | 511, 514-526, | 274-293^{b} |
| | | 529, 840-842, | |
| | | 864^{a} | |
| 926^{c} | 5′-CAG CTG CTC GTG GTG CAT CTC GAT | 511, 514-526, | 676-699^{b} |
| | | 529, 840-842, | |
| | | 864^{a} | |
| 927 | 5′-ACG CGG AGA AGG TGC GCT T | 511,514-526, | 389-407^{b} |
| | | 529, 840-842, | |
| | | 864^{a} | |
| 928^{c} | 5′-GGT CGT TCT TCG AGT CAC CGC A | 511, 514-526, | 778-799 b |
| | | 529, 840-842, | |
| | | 864^{a} | |
| | Universal primers (bacteria) | | |
| 636 | 5′-ACT GGY GTT GAI ATG TTC CGY AA | 7, 54, 78, | 470-492^{d} |
| | | 100, 103, 159, | |
| | | 209, 224, 227^{b} | |
| 637^{c} | 5′-ACG TCA GTI GTA CGG AAR TAG AA | 7, 54, 78, | 692-714^{d} |
| | | 100, 103, 159, | |
| | | 209, 224, 227^{b} | |
| 638 | 5′-CCA ATG CCA CAA ACI CGT GAR CAC AT | 7, 54, 78, | 35-60^{e} |
| | | 100, 103, 159, | |
| | | 209, 224, 227^{b} | |
| 639^{c} | 5′-TTT ACG GAA CAT TTC WAC ACC WGT IAC A | 7, 54, 78, | 469-496^{e} |
| | | 100, 103, 159, | |
| | | 209, 224, 227^{b} | |

^{a}These sequences were aligned to derive the corresponding primer.
^{b}The nucleotide positions refer to the L. tropica tuf (EF-1) sequence fragment
(SEQ ID NO. 526)
^{c}These sequences are from the complementary DNA strand of the sequence of the
originating fragment given in the Sequence Listing.
^{d}The nucleotide positions refer to the E. coli tuf sequence fragment
(SEQ ID NO. 78).
^{e}The nucleotide positions refer to the B. cereus tuf sequence fragment
(SEQ ID NO. 7).

| | | | |
|---|---|---|---|
| 643 | 5′-ACT GGI GTI GAR ATG TTC CGY AA | 1, 3, 4, 7, 12, | 470-492^{b} |
| | | 13, 16, 49, 54, | |
| | | 72, 78, 85, 88, | |
| | | 91, 94, 98, 103, | |
| | | 108, 112, 115, | |
| | | 116, 120, 121, | |
| | | 126, 128, 134, | |
| | | 136, 146, 154, | |
| | | 159, 179, 186, | |
| | | 205, 209, 212, | |
| | | 224, 238^{a} | |
| 644^{c} | 5′-ACG TCI GTI GTI CKG AAR TAG AA | same as SEQ | 692-714^{b} |
| | | ID NO. 643 | |
| 643 | 5′-ACT GGI GTI GAR ATG TTC CGY AA | 1, 3, 4, 7, 12, | 470-492^{b} |
| 13, 16, 49, 54, | | | |
| | | 72, 78, 85, 88, | |
| | | 91, 94, 98, 103, | |
| | | 108, 112, 115, | |
| | | 116, 120, 121, | |
| | | 126, 128, 134, | |
| | | 136, 146, 154, | |
| | | 159, 179, 186, | |
| | | 205, 209, 212, | |
| | | 224, 238^{a} | |
| 645^{c} | 5′-ACG TCI GTI GTI CKG AAR TAR AA | same as SEQ | 692-714^{b} |
| | | ID NO. 643 | |
| 646 | 5′-ATC GAC AAG CCI TTC YTI ATG SC | 2, 13, 82 | 317-339^{d} |
| | | 122, 145^{a} | |
| 647^{c} | 5′-ACG TCC GTS GTR CGG AAG TAG AAC TG | 2, 13, 82 | 686-711^{d} |
| | | 122, 145^{a} | |
| 646 | 5′-ATC GAC AAG CCI TTC YTI ATG SC | 2, 13, 82 | 317-339^{d} |
| | | 122, 145^{a} | |
| 648^{c} | 5′-ACG TCS GTS GTR CGG AAG TAG ARC TG | 2, 13, 82 | 686-711^{d} |
| | | 122, 145^{a} | |

^{a}These sequences were aligned to derive the corresponding primer.
^{b}The nucleotide positions refer to the E. coil tuf sequence fragment
(SEQ ID NO. 78).
^{c}These sequences are from the complementary DNA strand of the sequence of the
originating fragment given in the Sequence Listing.
^{d}The nucleotide positions refer to the A. meyeri tuf sequence fragment
(SEQ ID NO. 2)

| | | | |
|---|---|---|---|
| 649 | 5′-GTC CTA TGC CTC ARA CWC GIG AGC AC | 8, 86, 141, 143^{a} | 33-58^{b} |
| 650^{c} | 5-TTA CGG AAC ATY TCA ACA CCI GT | 8, 86, 141, 143^{a} | 473-495^{b} |
| 636 | 5′-ACT GGY GTT GAl ATG TTC CGY AA | 8, 86, 141, 143^{a} | 473-495^{b} |
| 651^{c} | 5′-TGA CGA CCA CCI TCY TCY TTY TTC A | 8, 86, 141, 143^{a} | 639-663^{b} |
| | Universal primers (fungi) | | |
| 1974 | 5′-ACA AGG GIT GGR MSA AGG AGA C | 404, 405, 433, | 443-464^{d} |
| | | 445, 898, 1268, | |
| | | 1276, 1986^{a} | |
| 1975^{c} | 5′-TGR CCR GGG TGG TTR AGG ACG | 404, 405, 433, | 846-866^{d} |
| | | 445, 898, 1268, | |
| | | 1276, 1986^{a} | |
| 1976 | 5′-GAT GGA YTC YGT YAA ITG GGA | 407-412, | 286-306^{e} |
| | | 414-426, 428- | |
| | | 431, 439, 443, 447, | |
| | | 448, 622, 624, 665, | |
| | | 1685, 1987-1990^{a} | |
| 1977 | 5′CAT CIT GYA ATG GYA ATC TYA AT | same as SEQ | 553-575^{e} |
| | | ID NO. 1976 | |
| 1977 | 5′-GAT GGA YTC YGT YAA RTG GGA | same as SEQ | 286-306^{e} |
| | | ID NO. 1976 | |
| 1979^{c} | 5-CAT CYT GYA ATG GYA ASC TYA AT | same as SEQ | 553-575^{e} |
| | | ID NO. 1976 | |
| 1981 | 5′-TGG ACA CCI SCA AGI GGK CYG | 401-405, | 281-301^{d} |
| | | 433, 435, 436, | |
| | | 438, 444, 445, 449, | |
| | | 453, 455, 457, 779, | |
| | | 781-783, 785, 786, | |
| | | 788-790, 897-903, | |
| | | 1267-1272, 1274-1280, | |
| | | 1282-1287, 1991-1998^{a} | |
| 1980^{c} | 5′-TCR ATG GCI TCI AIR AGR GTY T | same as SEQ | 488-509^{d} |
| | | ID NO. 1981 | |

^{a}These sequences were aligned to derive the corresponding primer.
^{b}The nucleotide positions refer to the B. distasonis tuf sequence fragment
(SEQ ID NO. 8)
^{c}These sequences are from the complementary DNA strand of the sequence of the
originating fragment given in the Sequence Listing.
^{d}The nucleotide positions refer to the A. fumigatus tuf (EF-1) sequence
fragment (SEQ ID NO. 404)
^{e}The nucleotide positions refer to the C. albicans tuf (EF-1) sequence fragment
(SEQ ID NO. 407)

| | | | |
|---|---|---|---|
| 1982 | 5′-TGG ACA CYI SCA AGI GGK CYG | same as SEQ | 281-301^{a} |
| | | ID NO. 1981 | |
| 1980^{b} | 5′-TCR ATG GCI TCI AIR AGR GTY T | same as SEQ | 488-509^{a} |
| | | ID NO. 1981 | |
| 1983 | 5′-CYG AYT GCG CYA TIC TCA TCA | same as SEQ | 143-163^{a} |
| | | ID NO. 1981 | |
| 1980^{b} | 5′-TCR ATG GCI TCI AIR AGR GTY T | same as SEQ | 488-509^{a} |
| | | ID NO. 1981 | |
| 1984 | 5′-CYG AYT GYG CYA TYC TSA TCA | same as SEQ | 143-163^{a} |
| | | ID NO. 1981 | |
| 1980^{b} | 5′-TCR ATG GCI TCI AIR AGR GTY T | same as SEQ | 488-509^{a} |
| | | ID NO. 1981 | |
| | Sequencing primers | | |
| 556 | 5′-CGG CGC NAT CYT SGT TGT TGC | 668^{c} | 306-326 |
| 557^{b} | 5′-CCM AGG CAT RAC CAT CTC GGT G | 668^{c} | 1047-1068 |
| 694 | 5′-CGG CGC IAT CYT SGT TGT TGC | 668^{c} | 306-326 |
| 557^{b} | 5′-CCM AGG CAT RAC CAT CTC GGT G | 668^{c} | 1047-1068 |
| 664 | 5′-AAY ATG ATI ACI GGI GCI GCI CAR ATG GA | 619^{c} | 604-632 |
| 652^{b} | 5′-CCW AYA GTI YKI CCI CCY TCY CTI ATA | 619^{c} | 1482-1508 |
| 664 | 5′-AAY ATG ATI ACI GGI GCI GCI CAR ATG GA | 619^{c} | 604-632 |
| 561^{b} | 5′-ACI GTI CGG CCR CCC TCA CGG AT | 619^{c} | 1483-1505 |
| 543 | 5′-ATC TTA GTA GTT TCT GCT GCT GA | 607 | 8-30 |
| 660^{b} | 5′-GTA GAA TTG AGG ACG GTA GTT AG | 607 | 678-700 |
| 658 | 5′-GAT YTA GTC GAT GAT GAA GAA TT | 621 | 116-138 |
| 659^{b} | 5′-GCT TTT TGI GTT TCW GGT TTR AT | 621 | 443-465 |
| 658 | 5′-GAT YTA GTC GAT GAT GAA GAA TT | 621 | 116-138 |
| 661^{b} | 5′-GTA GAA YTG TGG WCG ATA RTT RT | 621 | 678-700 |
| 558 | 5′-TCI TTY AAR TAY GCI TGG GT | 665^{c} | 157-176 |
| 559^{b} | 5′-CCG ACR GCR AYI GTY TGI CKC AT | 665^{c} | 1279-1301 |
| 813 | 5′-AAT CYG TYG AAA TGC AYC ACG A | 665^{c} | 687-708 |
| 559^{b} | 5′-CCG ACR GCR AYI GTY TGI CKC AT | 665^{c} | 1279-1301 |

^{a}The nucleotide positions refer to the A. fumigatus tuf (EF-1) sequence
fragment (SEQ ID NO. 404).
^{b}These sequences are from the complementary DNA strand of the sequence of the
originating fragment given in the Sequence Listing.
^{c}Sequences from databases.

| | | | |
|---|---|---|---|
| 558 | 5′-TCI TTY AAR TAY GCI TGG GT | 665^{a} | 157-176 |
| 815^{b} | 5′-TGG TGC ATY TCK ACR GAC TT | 665^{a} | 686-705 |
| 560 | 5′-GAY TTC ATY AAR AAY ATG ATY AC | 665^{a} | 289-311 |
| 559^{b} | 5′-CCG ACR GCR AYI GTY TGI CKC AT | 665^{a} | 1279-1301 |
| 653 | 5′-GAY TTC ATI AAR AAY ATG AT | 665^{a} | 289-308 |
| 559^{b} | 5′-CCG ACR GCR AYI GTY TGI CKC AT | 665^{a} | 1279-1301 |
| 558 | 5′-TCI TTY AAR TAY GCI TGG GT | 665^{a} | 157-176 |
| 655^{b} | 5′-CCR ATA CCI CMR ATY TTG TA | 665^{a} | 754-773 |
| 654 | 5′-TAC AAR ATY KGI GGT ATY GG | 665^{a} | 754-773 |
| 559^{b} | 5′-CCG ACR GCR AYI GTY TGI CKC AT | 665^{a} | 1279-1301 |
| 696 | 5′-ATI GGI CAY RTI GAY CAY GGI AAR AC | 698^{a} | 52-77 |
| 697^{b} | 5′-CCI ACI GTI CKI CCR CCY TCR CG | 698^{a} | 1132-1154 |
| 911 | 5′-GAC GGM KKC ATG CCG CAR AC | 853 | 22-41 |
| 914^{b} | 5′-GAA RAG CTG CGG RCG RTA GTG | 853 | 700-720 |
| 912 | 5′-GAC GGC GKC ATG CCG CAR AC | 846 | 20-39 |
| 914^{b} | 5′-GAA RAG CTG CGG RCG RTA GTG | 846 | 692-712 |
| 913 | 5′-GAC GGY SYC ATG CCK CAG AC | 843 | 251-270 |
| 915^{b} | 5′-AAA CGC CTG AGG RCG GTA GTT | 843 | 905-925 |
| 916 | 5′-GCC GAG CTG GCC GGC TTC AG | 846 | 422-441 |
| 561^{b} | 5′-ACI GTI CGG CCR CCC TCA CGG AT | 619^{a} | 1483-1505 |
| 664 | 5′-AAY ATG ATI ACI GGI GCI GCI CAR ATG GA | 619^{a} | 604-632 |
| 917^{b} | 5′-TCG TGC TAC CCG TYG CCG CCA T | 846 | 593-614 |

^{a}Sequences from databases.
^{b}These sequences are from the complementary DNA strand of the sequence of the
originating fragment given in the Sequence Listing.

| | | | |
|---|---|---|---|
| 1221 | 5′-GAY ACI CCI GGI CAY GTI GAY TT | 1230^{a} | 292-314 |
| 1226^{b} | 5′-GTI RMR TAI CCR AAC ATY TC | 1230^{a} | 2014-2033 |
| 1222 | 5′-ATY GAY ACI CCI GGI CAY GTI GAY TT | 1230^{a} | 289-314 |
| 1223^{b} | 5′-AYI TCI ARR TGI ARY TCR CCC ATI CC | 1230^{a} | 1408-1433 |
| 1224 | 5′-CCI GYI HTI YTI GAR CCI ATI ATG | 1230^{a} | 1858-1881 |
| 1225^{b} | 5′-TAI CCR AAC ATY TCI SMI ARI GGI AC | 1230^{a} | 2002-2027 |
| 1227 | 5′-GTI CCI YTI KCI GAR ATG TTY GGI TA | 1230^{a} | 2002-2027 |
| 1229^{b} | 5′-TCC ATY TGI GCI GCI CCI GTI ATC AT | 698^{a} | 4-29 |
| 1228 | 5′-GTI CCI YTI KCI GAR ATG TTY GGI TAY GC | 1230^{a} | 2002-2030 |
| 1229^{b} | 5′-TCC ATY TGI GCI GCI CCI GTI ATC AT | 698^{a} | 4-29 |
| 1999 | 5′-CAT GTC AAY ATT GGT ACT ATT GGT CAT GT 498-500, | 25-53^{d} | |
| | | 502, 505, 506, | |
| | | 508, 619, 2004, 2005^{c} | |
| 2000^{b} | 5′-CCA CCY TCI CTC AMG TTG AAR CGT T | same as SEQ | 1133-1157^{d} |
| | | ID NO. 1999 | |
| 2001 | 5′-ACY ACI TTR ACI GCY GCY ATY AC | same as SEQ | 67-89^{d} |
| | | ID NO. 1999 | |
| 2003^{b} | 5′-CAT YTC RAI RTT GTC ACC TGG | same as SEQ | 1072-1092^{d} |
| | | ID NO. 1999 | |
| 2002 | 5′-CCI GAR GAR AGA GCI MGW GGT | same as SEQ | 151-171^{d} |
| | | ID NO. 1999 | |
| 2003^{b} | 5′-CAT YTC RAI RTT GTC ACC TGG | same as SEQ | 1072-1092^{d} |
| | | ID NO. 1999 | |

^{a}Sequences from databases.
^{b}These sequences are from the complementary DNA strand of the sequence of the originating fragment given in the Sequence Listing.
^{c}These sequences were aligned to derive the corresponding primer.
^{d}The nucleotide positions refer to the C. albicans tuf sequence fragment (SEQ ID NO. 2004)

ANNEX II
Specific and ubiquitous primers for nucleic acid amplification (atpD sequences).

Originating DNA fragment

| | | | Nucleotide |
|---|---|---|---|
| SEQ ID NO. | Nucleotide sequence | SEQ ID NO. | position |
| Bacterial species: | Acinetobacter baumannii | | |
| 1690 | 5′-CAG GTC CTG TTG CGA CTG AAG AA | 243 | 186-208 |
| 1691^{b} | 5′-CAC AGA TAA ACC TGA GTG TGC TTT C | 243 | 394-418 |
| Bacterial species: | Bacteroides fragilis | | |
| 2134 | 5′-CGC GTG AAG CTT CTG TG | 929 | 184-200 |
| 2351^{b} | 5′-TCT CGC CGT TAT TCA GTT TC | 929 | 395-414 |
| Bacterial species: | Bordetella pertussis | | |
| 2180 | 5′-TTC GCC GGC GTG GGC | 1672^{c} | 544-558 |
| 2181^{b} | 5′-AGC GCC ACG CGC AGG | 1672^{c} | 666-680 |
| Bacterial species: | Enterococcus faecium | | |
| 1698 | 5′-GGA ATC AAC AGA TGG TTT ACA AA | 292 | 131-153 |
| 1699^{b} | 5′-GCA TCT TCT GGG AAA GGT GT | 292 | 258-277 |
| 1700 | 5′-AAG ATG CGG AAA GAA GCG AA | 292 | 271-290 |
| 1701^{b} | 5′-ATT ATG GAT CAG TTC TTG GAT CA | 292 | 439-461 |
| Bacterial species: | Klebsiella pneumoniae | | |
| 1331 | 5′-GCC CTT GAG GTA CAG AAT GGT AAT GAA GTT | 317 | 88-118 |
| 1332^{b} | 5′-GAC CGC GGC GCA GAC CAT CA | 317 | 183-203 |

^{a}These sequences were aligned to derive the corresponding primer.
^{b}These sequences are from the complementary DNA strand of the sequence of the
originating fragment given in the Sequence Listing.
^{c}Sequence from databases.

| | | | |
|---|---|---|---|
| Bacterial species: | Streptococcus agalactiae | | |
| 627 | 5′-ATT GTC TAT AAA AAT GGC GAT AAG TC | 379-383^{a} | 52-67^{b} |
| 625^{c} | 5′-CGT TGA AGA CAC GAC CCA AAG TAT CC | 379-383^{a} | 206-231^{b} |
| 628 | 5′-AAA ATG GCG ATA AGT CAC AAA AAG TA | 379-383^{a} | 52-77^{b} |
| 625^{c} | 5′CGT TGA AGA CAC GAC CCA AAG TAT CC | 379-383^{a} | 206-231^{b} |
| 627 | 5′-ATT GTC TAT AAA AAT GGC GAT AAG TC | 379-383^{a} | 42-67^{b} |
| 626^{b} | 5′-TAC CAC CTT TTA AGT AAG GTG CTA AT | 379-383^{a} | 371-396^{b} |
| 628 | 5′-AAA ATG GCG ATA AGT CAC AAA AAG TA | 379-383^{a} | 52-77^{b} |
| 626^{c} | 5′-TAC CAC CTT TTA AGT AAG GTG CTA AT | 379-383^{a} | 371-396^{b} |
| Bacterial group: | Campylobacter jejuni and C. coli | | |
| 2131 | 5′-AAG CMA TTG TTG TAA ATT TTG AAA G | 1576, 1600, | 7-31^{e} |
| | | 1849, 1863, 2139^{d, a} | |
| 2132^{c} | 5′-TCA TAT CCA TAG CAA TAG TTC TA | 1576, 1600, | 92-114^{e} |
| | | 1849, 1863, 2139^{d, a} | |
| Bacterial genus: | Bordetella sp. | | |
| 825 | 5′-ATG AGC ARC GSA ACC ATC GTT CAG TG | 1672^{d} | 1-26 |
| 826^{c} | 5′-TCG ATC GTG CCG ACC ATG TAG AAC GC | 1672^{d} | 1342-1367 |
| Fungal genus: | Candida sp. | | |
| 634 | 5′-AAC ACY GTC AGR RCI ATT GCY ATG GA | 460-472, | 101-126^{f} |
| | | 474-478^{a} | |
| 635^{c} | 5′-AAA CCR GTI ARR GCR ACT CTI GCT CT | 460-472, 617-642^{f} | |
| | | 474-478^{a} | |

^{a}These sequences were aligned to derive the corresponding primer.
^{b}The nucleotide positions refer to the S. agalactiae atpD sequence fragment
(SEQ ID NO. 380)
^{c}These sequences are from the complementary DNA strand of the sequence of the
originating fragment given in the Sequence Listing.
^{d}Sequence from databases.
^{e}The nucleotide positions refer to the C. jejuni atpD sequence fragment
(SEQ ID NO. 1576)
^{f}The nucleotide positions refer to the C. albicans atpD sequence fragment
(SEQ ID NO. 460)

| | | | |
|---|---|---|---|
| | Universal primers | | |
| 562 | 5′-CAR ATG RAY GAR CCI CCI GGI GYI MGI ATG | 243, 244, 262, | 528-557 b |
| | | 264, 280, 284, | |
| | | 291, 297, 309, | |
| | | 311, 315, 317, | |
| | | 324, 329, 332, | |
| | | 334-336, 339, | |
| | | 342, 343, 351, | |
| | | 356, 357, 364- | |
| | | 366, 370, 375, | |
| | | 379, 393^{a} | |
| 563^{c} | 5′-GGY TGR TAI CCI ACI GCI GAl GGC AT | 243, 244, 262, | 687-712^{b} |
| | | 264, 280, 284, | |
| | | 291, 297, 309, | |
| | | 311, 315, 317, | |
| | | 324, 329, 332, | |
| | | 334-336, 339, | |
| | | 342, 343, 351, | |
| | | 356, 357, 364- | |
| | | 366, 370, 375, | |
| | | 379, 393^{a} | |
| 564 | 5′-TAY GGI CAR ATG AAY GAR CCI CCI GGI AA | 243, 244, 262, | 522-550^{b} |
| | | 264, 280, 284, | |
| | | 291, 297, 309, | |
| | | 311, 315, 317, | |
| | | 324, 329, 332, | |
| | | 334-336, 339, | |
| | | 342, 343, 351, | |
| | | 356, 357, 364- | |
| | | 366, 370, 375, | |
| | | 379, 393^{a} | |
| 565^{c} | 5′-GGY TGR TAI CCI ACI GCI GAl GGD AT | 243, 244, 262, | 687-712^{b} |
| | | 264, 280, 284, | |
| | | 291, 297, 309, | |
| | | 311, 315, 317, | |
| | | 324, 329, 332, | |
| | | 334-336, 339, | |
| | | 342, 343, 351, | |
| | | 356, 357, 364- | |
| | | 366, 370, 375, | |
| | | 379, 393^{a} | |

^{a}These sequences were aligned to derive the corresponding primer.
^{b}The nucleotide positions refer to the K. pneumoniae atpD sequence fragment
(SEQ ID NO. 317)
^{c}These sequences are from the complementary DNA strand of the sequence of the
originating fragment given in the Sequence Listing.

| | | | |
|---|---|---|---|
| 640 | 5′-TCC ATG GTI TWY GGI CAR ATG AA | 248, 284, 315, | 513-535^{b} |
| | | 317, 343, 357, | |
| | | 366, 370, 379, 393^{a} | |
| 640^{c} | 5′-TGA TAA CCW ACI GCI GAl GGC ATA CG | 248, 284, 315, | 684-709^{b} |
| | | 317, 343, 357, | |
| | | 366, 370, 379, 393^{a} | |
| 642 | 5′-GGC GTI GGI GAR CGI ACI CGT GA | 248, 284, 315, | 438-460^{b} |
| | | 317, 343, 357, | |
| | | 366, 370, 379, 393^{a} | |
| 641^{c} | 5′-TGA TAA CCW ACI GCI GAI GGC ATA CG | 248, 284, 315, | 684-709^{b} |
| | | 317, 343, 357, | |
| | | 366, 370,379, 393^{a} | |
| | Sequencing primers | | |
| 566 | 5′-TTY GGI GGI GCI GGI GTI GGI AAR AC | 669^{d} | 445-470 |
| 567^{c} | 5′-TCR TCI GCI GGI ACR TAI AYI GCY TG | 669^{d} | 883-908 |
| 566 | 5′-TTY GGI GGI GCI GGI GTI GGI AAR AC | 669^{d} | 445-470 |
| 814 | 5′-GCI GGC ACG TAC ACI GCC TG | 666^{d} | 901-920 |
| 568 | 5′-RTI ATI GGI GCI GTI RTI GAY GT | 669^{d} | 25-47 |
| 567^{c} | 5′-TCR TCI GCI GGI ACR TAI AYI GCY TG | 669^{d} | 883-908 |
| 570 | 5′-RTI RYI GGI CCI GTI RTI GAY GT | 672^{d} | 31-53 |
| 567^{c} | 5′-TCR TCI GCI GGI ACR TAI AYI GCY TG | 669^{d} | 883-908 |
| 572 | 5′-RTI RTI GGI SCI GTI RTI GA | 669^{d} | 25-44 |
| 567^{c} | 5′-TCR TCI GCI GGI ACR TAI AYI GCY TG | 669^{d} | 883-908 |
| 569 | 5′-RTI RTI GGI SCI GTI RTI GAT AT | 671^{d} | 31-53 |
| 567^{c} | 5-TCR TCI GCI GGI ACR TAI AYI GCY TG | 669^{d} | 883-908 |
| 571 | 5′-RTI RTI GGI CCI GTI RTI GAT GT | 670^{d} | 31-53 |
| 567^{c} | 5′-TCR TCI GCI GGI ACR TAI AYI GCY TG | 669^{d} | 883-908 |

^{a}These sequences were aligned to derive the corresponding primer.
^{b}The nucleotide positions refer to the K. pneumnoniae atpD sequence fragment
(SEQ ID NO. 317).
^{c}These sequences are from the complementary DNA strand of the sequence of the
originating fragment given in the Sequence Listing.
^{d}Sequences from databases.

| | | | |
|---|---|---|---|
| 700 | 5′-TIR TIG AYG TCG ART TCC CTC ARG | 669a | 38-61 |
| 567^{b} | 5′-TCR TCI GCI GGI ACR TAI AYI GCY TG | 669^{a} | 883-908 |
| 568 | 5′-RTI ATI GGI GCI GTI RTI GAY GT | 669^{a} | 25-47 |
| 573^{b} | 5′-CCI CCI ACC ATR TAR AAI GC | 666^{a} | 1465-1484 |
| 574 | 5′-ATI GCI ATG GAY GGI ACI GAR GG | 666^{a} | 283-305 |
| 573^{b} | 5′-CCI CCI ACC ATR TAR AAI GC | 666^{a} | 1465-1484 |
| 574 | 5′-ATI GCI ATG GAY GGI ACI GAR GG | 666^{a} | 283-305 |
| 708^{b} | 5′-TCR TCC ATI CCI ARI ATI GCI ATI AT | 666^{a} | 1258-1283 |
| 681 | 5′-GGI SSI TTY GGI ISI GGI AAR AC | 685 | 694-716 |
| 682^{b} | 5′-GTI ACI GGY TCY TCR AAR TTI CCI CC | 686 | 1177-1202 |
| 681 | 5′-GGI SSI TTY GGI ISI GGI AAR AC | 685 | 694-716 |
| 683^{b} | 5′-GTI ACI GGI TCI SWI AWR TCI CCI CC | 685 | 1180-1205 |
| 681 | 5′-GGI SSI TTY GGI ISI GGI AAR AC | 685 | 694-716 |
| 699 | 5′-GTI ACI GGY TCY TYR ARR TTI CCI CC | 686 | 1177-1202 |
| 681 | 5′-GGI SSI TTY GGI ISI GGI AAR AC | 685 | 694-716 |
| 812^{b} | 5′-GTI ACI GGI TCY TYR ARR TTI CCI CC | 685 | 1180-1205 |
| 1213 | 5′-AAR GGI GGI ACI GCI GCI ATH CCI GG | 714^{a} | 697-722 |
| 1212^{b} | 5′-CCI CCI RGI GGI GAl ACI GCW CC | 714^{a} | 1189-1211 |
| 1203 | 5′-GGI GAR MGI GGI AAY GAR ATG | 709^{a} | 724-744 |
| 1207^{b} | 5′-CCI TCI TCW CCI GGC ATY TC | 709^{a} | 985-1004 |
| 1204 | 5′-GCI AAY AAC ITC IWN YAT GCC | 709^{a} | 822-842 |
| 1206^{b} | 5′-CKI SRI GTI GAR TCI GCC A | 709^{a} | 926-944 |
| 1205 | 5′-AAY ACI TCI AWY ATG CCI GT | 709^{a} | 826-845 |
| 1207^{b} | 5′-CCI TCI TCW CCI GGC ATY TC | 709^{a} | 985-1004 |
| 2282 | 5′-AGR RGC IMA RAT GTA TGA | 714^{a} | 84-101 |
| 2284^{b} | 5′-TCT GWG TRA CIG GYT CKG AGA | 714^{a} | 1217-1237 |
| 2283 | 5-ATI TAT GAY GGK ITT CAG AGG C | 714^{a} | 271-292 |
| 2285^{b} | 5′-CMC CIC CWG GTG GWG AWA C | 714^{a} | 1195-1213 |

^{a}Sequences from databases.
^{b}These sequences are from the complementary DNA strand of the sequence of the originating fragment given in the Sequence Listing.

ANNEX III

Internal hybridization probes for specific detection of tuf sequences.

Originating DNA fragment

| | | | |
|---|---|---|---|
| | | SEQ ID | Nucleotide |
| SEQ ID NO. | Nucleotide sequence | NO. | position |

| | | | |
|---|---|---|---|
| Bacterial species: | Abiorophia adiacens | | |
| 2170 | 5′-ACG TGA CGT TGA CAA ACC A | 1715 | 313-331 |
| Bacterial species: | Chlamydia pneumoniae | | |
| 2089 | 5′-ATG CTG AAC TTA TTG ACC TT | 20 | 136-155 |
| 2090 | 5′-CGT TAC TGG AGT CGA AAT G | 20 | 467-485 |
| Bacterial species: | Enterococcus faecails | | |
| 580 | 5′-GCT AAA CCA GCT ACA ATC ACT CCA C | 62-63, 607^{a} | 584-608^{b} |
| 603 | 5′-GGT ATT AAA GAC GAA ACA TC | 62-63, 607^{a} | 440-459^{b} |
| 1174 | 5′-GAA CGT GGT GAA GTT CGC | 62-63, 607^{a} | 398-415^{b} |
| Bacterial species: | Enterococcus faecium | | |
| 602 | 5′-AAG TTG AAG TTG TTG GTA TT | 64, 608^{a} | 426-445^{c} |
| Bacterial species: | Enterococcus gallinarum | | |
| 604 | 5′-GGT GAT GAA GTA GAA ATC GT | 66, 609^{a} | 419-438^{d} |
| Bacterial species: | Escherichla coli | | |
| 579 | 5′-GAA GGC CGT GCT GGT GAG AA | 78 | 503-522 |
| 2168 | 5′-CAT CAA AGT TGG TGA AGA AGT TG | 78 | 409-431 |
| Bacterial species: | Neisseria gonorrhoeae | | |
| 2166 | 5′-GAC AAA CCA TTC CTG CTG | 126 | |
| Fungal species: | Candida albicans | | |
| 577 | 5′-CAT GAT TGA ACC ATC CAC CA | 407-411^{a} | 406-425^{f} |
| Fungal species: | Candida dubliniensis | | |
| 578 | 5′-CAT GAT TGA AGC TTC CAC CA | 412, 414-415^{a} | 418-437^{g} |

^{a} These sequences were aligned to derive the corresponding primer.
^{b} The nucleotide positions refer to the E. faecalis tuf sequence fragment (SEQ ID NO. 607)
^{c} The nucleotide positions refer to the E. faecium tuf sequence fragment (SEQ ID NO. 608)
^{d} The nucleotide positions refer to the E. gallinarum tuf sequence fragment (SEQ ID NO. 609)
^{e} The nucleotide positions refer to the N. gonorrhoeae tuf sequence fragment (SEQ ID NO. 126)
^{f} The nucleotide positions refer to the C. albicans tuf(EF-1) sequence fragment
(SEQ ID NO. 408).
^{g} The nucleotide positions refer to the C. dubliniensis tuf(EF-1) sequence fragment
(SEQ ID NO. 414).

| | | | |
|---|---|---|---|
| Bacterial species: | Haemophilus Influenzae | | |
| 581 | 5′-ACA TCG GTG CAT TAT TAC GTG G | 610^{a} | 551-572 |
| Bacterial species: | Mycoplasma pneumoniae | | |
| 2095 | 5′-CGG TCG GGT TGA ACG TGG | 2097^{a} | 687-704 |
| Bacterial species: | Staphylococcus aureus | | |
| 584 | 5′-ACA TGA CAC ATC TAA AAC AA | 176-180^{b} | 369-388^{c} |
| 585 | 5′-ACC ACA TAC TGA ATT CAA AG | 176-180^{b} | 525-544^{c} |
| 586 | 5′-CAG AAG TAT ACG TAT TAT CA | 176-180^{b} | 545-564^{c} |
| 587 | 5′-CGT ATT ATC AAA AGA CGA AG | 176-180^{b} | 555-574^{c} |
| 588 | 5′-TCT TCT CAA ACT ATC GTC CA | 176-180^{b} | 593-612^{c} |
| Bacterial species: | Staphylococcus epidermidis | | |
| 589 | 5′-GCA CGA AAC TTC TAA AAC AA | 185, 611^{b} | 445-464^{d} |
| 590 | 5′-TAT ACG TAT TAT CTA AAG AT | 185, 611^{b} | 627-646^{d} |
| 591 | 5′-TCC TGG TTC TAT TAC ACC AC | 185, 611^{b} | 586-605^{d} |
| 592 | 5′-CAA AGC TGA AGT ATA CGT AT | 185, 611^{b} | 616-635^{d} |
| 593 | 5′-TTC ACT AAC TAT CGC CCA CA | 185, 611^{b} | 671-690^{d} |
| Bacterial species: | Staphylococcus haemolyticus | | |
| 594 | 5′-ATT GGT ATC CAT GAC ACT TC | 186, 188-190^{b} | 437-456^{e} |
| 595 | 5′-TTA AAG CAG ACG TAT ACG TT | 186, 188-190^{b} | 615-634^{e} |
| Bacterial species: | Staphylococcus hominis | | |
| 596 | 5′-GAA ATT ATT GGT ATC AAA GA | 191, 193-196^{b} | 431-450^{f} |
| 597 | 5′-ATT GGT ATC AAA GAA ACT TC | 191, 193-196^{b} | 437-456^{f} |
| 598 | 5′-AAT TAC ACC TCA CAC AAA AT | 191, 193-196^{b} | 595-614^{f} |

^{a} Sequences from databases.
^{b} These sequences were aligned to derive the corresponding probe.
^{c} The nucleotide positions refer to the S. aureus tuf sequence fragment (SEQ ID NO. 179)
^{d} The nucleotide positions refer to the S. epidermidis tuf sequence fragment (SEQ ID NO. 611).
^{e} The nucleotide positions refer to the S. haemolyticus tuf sequence fragment (SEQ ID NO. 186).
^{f} The nucleotide positions refer to the S. hominis tuf sequence fragment (SEQ ID NO. 191)

| | | | |
|---|---|---|---|
| Bacterial species: | Staphylococcus saprophyticus | | |
| 599 | 5′-CGG TGA AGA AAT CGA AAT CA | 198-200^{a} | 406-425^{b} |
| 600 | 5′-ATG CAA GAA GAA TCA AGC AA | 198-200^{a} | 431-450^{b} |
| 601 | 5′-GTT TCA CGT GAT GAT GTA CA | 198-200^{a} | 536-555^{b} |
| 695 | 5′-GTT TCA CGT GAT GAC GTA CA | 198-200^{a} | 563-582^{b} |
| Bacterial species: | Streptococcus agalactiae | | |
| 582^{c} | 5′-TTT CAA CTT CGT CGT TGA CAC GAA CAG T | 207-210^{a} | 404-431^{d} |
| 583^{c} | 5′-CAA CTG CTT TTT GGA TAT CTT CTT TAA TAC CAA CG | 207-210^{a} | 433-467^{d} |
| 1199 | 5′-GTA TTA AAG AAG ATA TCC AAA AAG C | 207-210^{a} | 438-462^{d} |
| Bacterial species: | Streptococcus pneumoniae | | |
| 1201 | 5′-TCA AAG AAG AAA CTA AAA AAG CTG T | 971, 977, | 513-537^{e} |
| | | 979, 986^{a} | |
| Bacterial species: | Streptococcus pyogenes | | |
| 1200 | 5′-TCA AAG AAG AAA CTA AAA AAG CTG T | 1002 | 473-497 |
| Bacterial group: | Enterococcus casseliflavus-flavescens- | | |
| | gallinarum group | | |
| 620 | 5′-ATT GGT GCA TTG CTA CGT | 58, 65, 66^{a} | 527-544^{f} |
| 1122 | 5′-TGG TGC ATT GCT ACG TGG | 58, 65, 66^{a} | 529-546^{f} |
| Bacterial group: | Enterococcus sp., Gemella sp., A. adiacens | | |
| 2172 | 5′-GTG TTG AAA TGT TCC GTA AA | 58-62, 67-71, | 477-496^{g} |
| | | 87-88, 607-609, | |
| | | 727, 871 | |
| | | 1715, 1722^{a} | |

^{a} These sequences were aligned to derive the corresponding primer.
^{b} The nucleotide positions refer to the S. saprophyticus tuf sequence fragment (SEQ ID NO. 198)
^{c} These sequences are from the complementary DNA strand of the sequence of the originating
fragment given in the Sequence Listing.
^{d} The nucleotide positions refer to the S. agalactiae tuf sequence fragment (SEQ ID NO. 209).
^{e} The nucleotide positions refer to the S. pneumoniae tuf sequence fragment (SEQ ID NO. 986)
^{f} The nucleotide positions refer to the E. flavescens tuf sequence fragment (SEQ ID NO. 65)
^{g} The nucleotide positions refer to the E. faecium tuf sequence fragment (SEQ ID NO. 608)

| | | | |
|---|---|---|---|
| Bacterial genus: | Gemella | | |
| 2171 | 5′-TCG TTG GAT TAA CTG AAG AA | 87, 88^{a} | 430-449^{b} |
| Bacterial genus: | Staphylococcus sp. | | |
| 605 | 5′-GAA ATG TTC CGT AAA TTA TT | 176-203^{a} | 403-422^{c} |
| 606 | 5′-ATT AGA CTA CGC TGA AGC TG | 176-203^{a} | 420-439^{c} |
| 1175 | 5′-GTT ACT GGT GTA GAA ATG TTC | 176-203^{a} | 391-411^{c} |
| 1176 | 5′-TAC TGG TGT AGA AAT GTT C | 176-203^{h} | 393-411^{c} |
| Bacterial genus: | Streptococcus sp. | | |
| 1202 | 5′-GTG TTG AAA TGT TCC GTA AAC A | 206-231, 971, | 466-487^{d} |
| Fungal species: | Candida albicans | | |
| 1156 | 5′-GTT GAA ATG CAT CAC GAA CAA TT | 407-412, 624^{a} | 680-702^{e} |
| Fungal group: | Candida albicans and C. tropicalis | | |
| 1160 | 5′-CGT TTC TGT TAA AGA AAT TAG AAG | 407-412, | 748-771^{e} |
| | | 429, 624^{a} | |
| Fungal species: | Candida dubliniensia | | |
| 1166 | 5′-ACG TTA AGA ATG TTT CTG TCA A | 414-415^{a} | 750-771^{f} |
| 1168 | 5′-GAA CAA TTG GTT GAA GGT GT | 414-415^{a} | 707-726^{f} |
| Fungal species: | Candida glabrata | | |
| 1158 | 5′-AAG AGG TAA TGT CTG TGG T | 417 | 781-799 |
| 1159 | 5′-TGA AGG TTT GCC AGG TGA | 417 | 718-735 |
| Fungal species: | Candida krusei | | |
| 1161 | 5′-TCC AGG TGA TAA CGT TGG | 422 | 720-737 |

^{a} These sequences were aligned to derive the corresponding primer.
^{b} The nucleotide positions refer to the C. haemolysans tuf sequence fragment (SEQ ID NO. 87)
^{c} The nucleotide positions refer to the S. aureus tuf sequence fragment (SEQ ID NO. 179)
^{d} The nucleotide positions refer to the S. pneuinoniae tuf sequence fragment (SEQ ID NO. 986).
^{e} The nucleotide positions refer to the C. albicans tuf(EF-1) sequence fragment (SEQ ID NO. 408)
^{f} The nucleotide positions refer to the C. dubliniensis tuf(EF-1) sequence fragment
(SEQ ID NO. 414)

| | | | |
|---|---|---|---|
| Fungal group: | Candida lusitaniae and C. guillermondii | | |
| 1162 | 5′-CAA GTC CGT GGA AAT GCA | 418, 424^{a} | 682-699^{b} |
| Fungal species: | Candida parapsilosis | | |
| 1157 | 5′-AAG AAC GTT TCA GTT AAG GAA AT | 426 | 749-771 |
| Fungal species: | Candida zeylanoides | | |
| 1165 | 5′-GGT TTC AAC GTG AAG AAC | 432 | 713-730 |
| Fungal genus: | Candida sp. | | |
| 1163 | 5′-GTT GGT TTC AAC GTT AAG AAC | 407-412, 414- | 728-748^{c} |
| | | 415, 417, 418, | |
| | | 422, 429^{a} | |
| 1164 | 5′-GGT TTC AAC GTC AAG AAC | 413, 416, 420, | 740-757^{b} |
| | | 421, 424, 425, | |
| | | 426, 428, 431^{a} | |
| 1167 | 5′-GTT GGT TTC AAC GT | 406-426, 428- | 728-741^{c} |
| | | 432, 624^{a} | |

^{a}These sequences were aligned to derive the corresponding primer.
^{b}The nucleotide positions refer to the C. lusitaniae tuf(EF-1) sequence fragment (SEQ ID NO. 424).
^{c}The nucleotide positions refer to the C. albicans tuf(EF-1) sequence fragment (SEQ ID NO. 408).

ANNEX IV
Strategy for the selection of amplification/sequencing primers from atpD (F-type) sequences.

| | | SEQ ID | |
|---|---|---|---|
| | 23 49 443 | NO.: | Accession #: |
| B. cepacia | AGTgCAT CGGCGCCGTT ATCGACGTGG...TGTTCG GCGGTGCTGG CGTGGGCAAG | — | X76877 |
| B. pertussis | AGTgCAT CGGCGCCGTG GTGGATATTC...TGTTCG GCGGCGCCGG CGTGGGCAAG | — | Genome project |
| P. aeruginosa | AAATCAT CGGCGCCGTG ATCGACGTGG...TGTTCG GCGGCGCCGG CGTGGGCAAG | — | Genome project |
| E. coli | AGGTAAT CGGCGCCGTA GTTGACGTCG...TGTTCG GTGGTGCGGG TGTAGGTAAA | — | J01594 |
| N. gonorrhoeae | AAATTAT CGGTGCGGTT GTTGACGTGG...TGTTCG GCGGTGCCGG TGTGGGTAAA | — | Genome project |
| M. thermoacetica | AGGTTAT TGGCCCGGTG GTTGACGTCG...TCTTCG GCGGCGCCGG GGTCGGCAAG | — | U64318 |
| S. aurantiaca | AGGTTcT CGGTCCCGTG ATTGACGTGG...TGTTCG GCGGCGCCGG CGTGGGCAAG | — | X76879 |
| M. tuberculosis | GGGTCAC TGGGCCCGTC GTCGACGTCG...TGTTCG GCGGTGCCGG GGTGGGCAAG | — | Z73419 |
| B. fragilis | AGGTAAT TGGCCCTGTG GTCGATGTGT...TGTTTG GCGGGGCCGG AGTGGGTAAA | — | M22247 |
| C. lytica | AAATTAT TGGCCCACTT ATAGATGTGG...TATTTG GAGGTGCCGG AGTAGGTAAA | 672 | M22535 |
| A. woodii | AGGTTAT TGGACCAGTA GTCGATGTTA...TTTTCG GTGGTGCCGG AGTTGGTAAA | — | U10505 |
| C. acetobutyilcum | AGGTAAT AGGACCTGTT GTGGATATTA...TGTTCG GTGGTGCCGG TGTTGGTAAA | 671 | AF101055 |
| M. pneumoniae | AAGTGAT TGGCCCGGTA GTTGATGTCA...TATTTG GTGGTGCTGG TGTTGGTAAA | — | U43738 |
| H. pylori | AGGTTtT AGGCCCGGTG GTAGATGTGG...TGTTTG GTGGGGCTGG CGTACGCAAA | 670 | AF004014 |
| Selected | | | |
| sequences for | | | |
| universal primers | RTIAT IGGICCIGTI RTIGAYGT | 568 | |
| | RTIRY IGGICCIGTI RTIGAYGT | 570 | |
| | RTIRT IGGISCICTI RTIGA | 572 | |
| | RTIRT IGGISCIGTI RTZGATAT | 569 | |
| | RTIRT IGGICCIGTI RTIGATGT | 571 | |
| | TTYG GIGGIGCIGG IGTIGGIAAR | 566 | |
| Selected | | | |
| sequence for | | | |
| universal primer^{a} | | | |

| | | SEQ ID | |
|---|---|---|---|
| | 472 881 910 | NO.: | Accession #: |
| B. cepacia | ACCG...TCCA GGCCGTGT ACGTCCCTGC GGACGACT | — | X76877 |
| B. pertussis | ACCG...TCCA GGCCGTGT ACGTGCCTGC CGACGACT | — | Genome project |
| P. aeruginosa | ACCG...TCCA GGCCGTAT ACGTTCCCGC GGACGACC | — | Genome project |
| E. coli | ACCG...TACA GGCAGTAT ACGTACCTGC GGATGACT | — | J01594 |
| N. gonorrhoeae | ACCG...TCCA AGCCGTAT ATGTACCTGC GGATGACT | — | Genome project |
| M. thermoacetica | ACGG.. TGCA AGCTATCT ATGTGCCGGC CGACGACC | — | U64318 |
| S. aurantiaca | ACGG...TGCA GGCCATCT ACGTGCCCGC CGACGACC | — | X76879 |
| M. tuberculosis | ACGG...TGCA AGCCGTCT ACGTGCCCGC CGACGACT | — | Z73419 |
| B. fragilis | ACGG...TGCA CGCTGTTT ACGTACCGGC TGATGACT | — | M22247 |
| C. lytica | ACAG...TACA GGCGGTTT ACGTACCTGC GGATQATT | 672 | M22535 |
| A. woodii | ACCG...TTCA GGCCGTTT ACGaTCCAGC CGATGACT | — | U10505 |
| C. acetobutyilcum | ACAG...TTCA GGCTGTAT ATGTTCCTGC TGATGACC | 671 | AF101055 |
| M. pneumoniae | ACGG...TGCA AGCGATCT ATGTGCCAGC TGATGACT | — | U43738 |
| H. pylori | ACGG...TTCA AGCGGTGT ATGTGCCAGC AGACGACT | 670 | AF004014 |
| Selected | | | |
| sequences for | | | |
| universal primers | | | |
| | AC | 566 | |
| Selected | | | |
| sequence for | CA RGCIRTIT AYGTICCIGC IGAYGA | 567 | |
| universal primer^{a} | | | |

The sequence numbering refers to the Escherichia coli atpD gene fragment (SEQ ID NO. 669).
Nucleotides in capitals are identical to the selected sequences or match those sequences.
Mismatches are indicated by lower-case letters.
Dots indicate gaps in the sequences displayed.
“R” “Y” “N” “K” “W” and “S” designate nucleotide positions which are degenerated.
“R” stands for A or G;
“Y” stands for C or T;
“M” stands for A or C;
“K” stands for G or T;
“W” stands for A or T;
“S” stands for C or G.
“I” stands for inosine which is a nucleotide analog that can bind to any of the four nucleotides A, C, G or T.
^{a}This sequence is the reverse-complement of the selected primer.

ANNEX V

Strategy for the selection of universal amplification/sequencing
primers from atpD (V-type) sequences.

| | |
|---|---|
| | SEQ ID |
| 691 719 1177 1208 | NO.: |

| | | |
|---|---|---|
| E. hirae | CC AGGTCCGTTT GGTGCAGGGA AGACAGT...TCTGGTGGAg ATaTCtctGA ACCAGTGACT CA | 685 |
| H. salinarum | CC GGGGCCGTTC GGGTCCGGGA AGACGGT...CCCGGCGGGg ACTTCtccGA GCCGGTCACC CA | 687 |
| T. thermophilus | CC TGGGCCCTTC GGCAGCGGCA AGACCGT...CCGGGCGGCg ACaTgtccGA GCCCGTGACC CA | 693 |
| Human | CC TGGGGCCTTC GGATGTGGCA AGACTGT...CCCGGTGGAg ACTTCtcAGA tCCCGTGACG AC | 688 |
| T. congolense | CC TGGCGCGTTT GGATGCGGAA AGACGGT...CCTGGAGGTg ACTTTtctGA cCCAGTGACG TC | 692 |
| P. falciparum | CC TGGTGCATTT GGTTGTGGAA AAACTTG...CCAGGTGGTg ATTTCtctGA cCCTGTAACT AC | 689 |
| C. pneumoniae | CC AGGACCTTTT GGTGCAGGGA AAACAGT...GCAGGAGGAA ACTTTGAAGA ACCAGTCACT CA | 686 |
| Selected sequences | | |
| for universal primers | GGISSITTY GGIISIGGIA ARAC | 681 |
| Selected sequences | GGIGGIA AYTTYGARGA RCCIGTIAC | 682 |
| for universal primers^{a} | GGIGGIG AYWTIWSIGA ICCIGTIAC | 683 |

The sequence numbering refers to the Enterococcus hirae atpD gene fragment (SEQ ID NO. 685).
Nucleotides in capitals are identical to the selected sequences or match those sequences.
Mismatches for SEQ ID NOs. 681 and 682 are indicated by lowercase letters.
Mismatches for SEQ ID NO. 683 are indicated by underlined nucleotides.
Dots indicate gaps in the sequences displayed.
R” “Y” “M” “K” “W” and “S” designate nucleotide positions which are degenerated.
“R” stands for A or G;
“Y” stands for C or T;
“M” stands for A or C;
“K” stands for G or T;
“W” stands for A or T;
“S” stands for C or G.
“I” stands for inosine which is a nucleotide analog that can bind to any of the four nucleotides A, C, C or T.
^{a}These sequences are the reverse-complement of the selected primers.

ANNEX VI

Strategy for the selection of universal amplification/sequencing
primers from tuf (M) sequences (organelle origin).

| | | |
|---|---|---|
| 601 635 1479 | SEQ ID NO. | Accession #: |

| | | | |
|---|---|---|---|
| C. neaformans^{a} | AAGAA CATGATCACC GGTaCCtCCC AGgctGACTG...CGCcgTCcGA | — | U81803 |
| S. cerevisiae^{a} | AAGAA CATGATTACT GGTaCTtCTC AAgctGACTG...CGCTgTCAGA | 665 | X00779 |
| O. volvulus^{a} | AAGAA TATGATCACA GGTaCTtCTC AGgctGACTG...TGCTgTGcGt | — | M64333 |
| Human^{a} | AAAAA CATGATTACA GGGaCAtCTC AGgctGACTG...TGCTgTTcGt | — | X03558 |
| G. max B1^{b} | AAGAA CATGATCACC GGCGCTGCCC AGATGGACGG...TGCTATTAGA | — | Y15107 |
| G. max B2^{b} | AAAAA CATGATCACC GGCGCCGCCC AGATGGACGG...TGCTATTAGA | — | Y15108 |
| E. coli^{c} | AAAAA CATGATCACC GGTGCTGCTC AGATGGACGG...CGCaATCcGt | 78 | — |
| S. aureofaciens^{c} | AAGAA CATGATTCAC GGTGCCGCCC AGATGGACGG...CGCcATCcGt | — | AF007125 |
| E. tenella^{b} | AAGAA TATGATTACA GGAGCAGCAC AAATGGATGG...TGCTATAAGA | — | AI755521 |
| T. gondii^{b} | AAGAA TATGATTACT GGAGCCGCAC AAATGGATGG...TGCTATTAGA | — | Y11431 |
| S. cerevisiae^{b} | AAGAA TATGATTACC GGTGCTGCTC AAATGGATGG...CAATATCAGA | 619 | K00428 |
| A. thaliana^{b} | AAAAA TATGATTACT GGAGCTGCGC AAATGGATGG...TGCCtTAAGG | — | X89227 |
| Selected sequence | AA YATGATIACI GGIGCICCIC ARATGGA | 664 | |
| for universal | | | |
| primer | | | |
| Selected sequences | TATIAGR | 652 | |
| for universal | ATCCGT | 561 | |
| primers | | | |

| | | |
|---|---|---|
| 1511 | SEQ ID NO. | Accession #: |

| | | | |
|---|---|---|---|
| C. neaformans^{a} | GAcatGcGAC AGACcGTTGc CGT | — | U81803 |
| S. cerevisiae^{a} | GAcatGaGAC AAACTGTcGc TGT | 665 | X00779 |
| O. volvulus^{a} | GAtatGaGAC AAACaGTTGc GGT | — | M64333 |
| Human^{a} | GAtatGaGAC AGACaGTTGc TGT | — | X03558 |
| G. max B1^{b} | GAAGGAGGCA AAACTGTTGG AGC | — | Y15107 |
| G. max B2^{b} | GAAGGAGGCA AAACTGTTGG AGC | — | Y15108 |
| E. coli^{c} | GAAGGCGGCC GTACcGTTGG CGC | 78 | — |
| S. aureofaciens^{c} | GAGGGTGGTC GTACcGTgGG CGC | — | AF007125 |
| E. tenella^{b} | GAAGGAGGAA AAACTATAGG AGC | — | AI755521 |
| T. gondii^{b} | GAAGGAGGTC GTACTATAGG AGC | — | Y11431 |
| S. cerevisiae^{b} | GAGGGTGGAA GAACTGTTGG TAC | 619 | K00428 |
| A. thaliana^{b} | GAAGGAGGTA GAACaGTTGG AGC | — | X89227 |
| Selected sequence | | | |
| for universal | | | |
| primer | | | |
| Selected sequences | GARGGIGGIM RIACTRTWGG^{d} | 652 | |
| for universal | GAGGGGYGGCC GITCIGT^{d} | 561 | |
| primers | | | |

The sequence numbering refers to the Saccharomyces cerevisiae tuf (M) gene (SEQ ID NO. 619).
Nucleotides in capitals are identical to the selected sequences or match those sequences.
Mismatches for SEQ ID NOs. 652 and 664 are indicated by lowercase letters.
Mismatches for SEQ ID NO. 561 are indicated by underlined nucleotides.
Dots indicate gaps in the sequences displayed.
“R” “Y” “M” “K” “W” and “S” designate nucleotide positions which are degenerated.
“R” stands for A or G;
“Y” stands for C or T;
“M” stands for A or C;
“K” stands for G or T;
“W” stands for A or T;
“S” stands for C or G.
“I” stands for inosine which is a nucleotide analog that can bind to any of the four nucleotides A, C, G or T.
^{a}This sequence refers to tuf(EF-1) gene.
^{b}This sequence refers to tuf (M) or organelle gene.
^{c}This sequence refers to tuf gene from bacteria.
^{d}These sequences are the reverse-complement of the selected primers.

ANNEX VII

Strategy for the selection of eukaryotic sequencing primers from tuf (EF-1) sequences.

| | | SEQ ID | Accession |
|---|---|---|---|
| | 154 179 286 314 | NO.: | #: |
| S. cerevisiae | GG TTCTTTCAAG TACGCTTGGG TTTT...AGAGA TTTCATCAAG AACATGATTA CTGG... | 665 | X00779 |
| B. hominis | GG CTCCTTCAAG TACGCGTGGG TGCT...CGTGA CTTCATaAAG AACATCATCA CTGG... | — | D64080 |
| C. albicans | GG TTCTTTCAAA TACGCTTGGG TCTT...AGAGA TTTCATCAAG AATATGATCA CTGG... | — | M29934 |
| C. neoformans | TC TTCTTTCAAG TACGCTTGGG TTCT...CGAGA CTTCATCAAG AACATGATCA CCGG... | — | U81803 |
| E. histolytica | GG ATCATTCAAA TATGCTTGGG TCTT...AGAGA TTTCATTAAG AACATGATTA CTGG... | — | M92073 |
| G. lamblia | GG CTCCTTCAAG TACGCGTGGG TCCT...CGCGA CTTCATCAAG AACATGATCA CGGG... | — | D14342 |
| H. capsulatum | AA ATCCTTCAAA TATGCGTGGG TCCT...CGTGA CTTCATCAAG AACATGATCA CTGG... | — | U14100 |
| Human | GG CTCCTTCAAG TATGCCTGGG TCTT...AGAGA CTTtATCAAA AACATGATTA CAGG... | — | X03558 |
| L. braziliensis | GC GTCCTTCAAG TACGCGTGGG TGCT...CGCGA CTTCATCAAG AACATGATCA CCGG... | — | U72244 |
| O. volvulus | GG CTCATTTAAA TATGCTTGGG TATT...CGTGA TTTCATTAAG AATATGATCA CAGG... | — | M64333 |
| P. berghei | GG TagTTTCAAA TATGCATGGG TTTT...AAAcA TTTtATTAAA AATATGATTA CTGG... | — | AJ224 150 |
| P. knowlesi | GG AagTTTTAAG TACGCATGGG TGTT...AAGGA TTTCATTAAA AACATGATTA CCGG... | — | AJ224153 |
| S. pombe | GG TTCCTTCAAG TACGCCTGGG TTTT...CGTGA TTTCATCAAG AACATGATTA CCGG... | — | U42189 |
| T. cruzi | TC TTCTTTCAAG TACGCGTGGG TCTT...CGCGA CTTCATCAAG AACATGATCA CGGG... | — | L76077 |
| Y. lipolytica | GG TTCTTTCAAG TACGCTTGGG TTCT...CGAGA TTTCATCAAG AACATGATCA CCGG... | — | AF054510 |
| Selected sequences | TCITTYAAR TAYGCITGGG T | 558 | |
| for amplification | GA YTTCATYAAR AAYATGATYA C | 560 | |
| primers | GA YTTCATIAAR AAYATGAT | 653 | |

The sequence numbering refers to the Saccharomyces cerevisiae tuf (EF1) gene fragment (SEQ ID NO. 665).
Nucleotides in capitals are identical to the selected sequences SEQ ID NOs. 558, 560 or 653,
or match those sequences.
Mismatches for SEQ ID no. 558 and 560 are indicated by lowercase letters.
Mismatches for SEQ ID NO. 653 are indicated by underlined nucleotides.
Dots indicate gaps in the sequences displayed.
“R” “Y” “M” “K” “W” and “S” designate nucleotide positions which are degenerated.
“R” stands for A or G;
“Y” stands for C or T;
“M” stands for A or C;
“K” stands for G or T;
“W” stands for A or T;
“S” stands for C or G.
“I” stands for inosine which is a nucleotide analog that can bind to any of the four nucleotides
A, C, G or T.

| | | SEQ ID | Accession |
|---|---|---|---|
| | 751 776 1276 1304 | NO.: | #: |
| S. cerevisiae | ...GTTTACAA GATCGGTGGT ATTGGTAC...GACATG AGACAAACTG TCGCTGTCGG TGT | 665 | X00779 |
| B. hominis | ...GTGTACAA GATTGGCGGT ATTGGTAC...GATATG AGACAGACTG TCGCTGTCGG TAT | — | D64 080 |
| C. albicans | ...GTTTACAA GATCGGTGGT ATTGGTAC...GATATG AGACAAACCG TTGCTGTtGG TGT | — | M29934 |
| C. neoformans | ...GTCTACAA GATCGGTGGT ATCGGCAC...GACATG CGACAGACCG TTGCCGTtGG TGT | — | U81803 |
| E. histolytica | ...GTTTACAA GATTTCAGGT ATTGGAAC...GATATG AaACAAACCG TTGCTGTtGG AGT | — | M92073 |
| G. lamblia | ...GTCTACAA GATCTcGGGc gTCGGGAC...~~~~~~ ~~~~~~~~~~ ~~~~~~~~~~ ~~~ | — | D14342 |
| H. capsulatum | ...GTGTACAA AATCTcTGGT ATTGGCAC...GACATG AGACAAACCG TCGCTGTCGG TGT | — | U14100 |
| Human | ...GTCTACAA AATTGGTGGT ATTGGTAC...GATATG AGACAGACAG TTGCgGTgGG TGT | — | X03558 |
| L. braziliensis | ...GTGTACAA GATCGGCGGT ATCGGCAC...GACATG CGCagAACGG TCGCCGTCGG CAT | — | U72244 |
| O. volvulus | ...GTTTACAA AATTGGAGGT ATTGGAAC...GATATG AGACAAACAG TTGCTGTtGG CGT | — | M64333 |
| P. berghei | ...GTATACAA AATTGGTGGT ATTGGTAC...GATATG AGACAAACAA TTGCTGTCGG TAT | — | AJ224150 |
| P. knowlesi | ...GTATACAA AATCGGTGGT ATTGGTAC...GATATG AGACAAACCA TTGCTGTCGG TAT | — | AJ224153 |
| S. pombe | ...GTTTACAA GATCGGTGGT ATTGGTAC...GACATG CGTCAAACCG TCGCTGTCGG TGT | — | U42189 |
| T. cruzi | ...GTGTACAA GATCGGCGGT ATCGGCAC...GACATG CGCCAGACGG TCGCCGTCGG CAT | — | L76077 |
| Y. lipolytica | ...GTCTACAA GATCGGTGGT ATCGGCAC...GACATG CGACAGACCG TTGCTGTCGG TGT | — | AF054510 |
| Selected sequence | TACAA RATYKGIGGT ATYGG | 654 | |
| for amplification | | | |
| primer | | | |
| Selected sequences | TACAA RATYKGIGGT ATYGG | 655 | |
| for amplification | ATG MGICARACIR TYGCYGTCGG | 559 | |
| primers^{a} | | | |

The sequence numbering refers to the Saccharomyces cerevisiae tuf (EF-1) gene fragment (SEQ ID NO. 665).
Nucleotides in capitals are identical to the selected sequences or match those sequences.
Mismatches are indicated by lowercase letters.
“~” indicate incomplete sequence data.
Dots indicate gaps in the sequences displayed.
“R” “Y” “N” “K” “W” and “S” designate nucleotide positions which are degenerated.
“R” stands for A or G;
“Y” stands for C or T;
“N” stands for A or C;
“K” stands for G or T;
“W” stands for A or T;
“S” stands for C or G.
“I” stands for inosine which is a nucleotide analog that can bind to any of the four nucleotides A, C, G or T.
^{a}This sequences are the reverse-complement of the selected primers.

ANNEX VIII

Strategy for the selection of Streptococcus agalactiae-specific
amplification primers from tuf sequences.

| | | |
|---|---|---|
| | SEQ ID | Accession |
| 305 334 517 542 | NO.: | #: |

| | | | |
|---|---|---|---|
| S. agalactiae | CCAGAA CGTGATACTG ACAAACCTTT ACTT...GGAC AACGTTGGTG TTCTTCTTCG TG | 207 | — |
| S. agalactiae | CCAGAA CGTGATACTG ACAAACCTTT ACTT...GGAC AACGTTGGTG TTCTTCTTCG TG | 208 | — |
| S. agalactiae | CCAGAA CGTGATACTG ACAAACCTTT ACTT...GGAC AACGTTGGTG TTCTTCTTCG TG | 209 | — |
| S. agalactiae | CCAGAA CGTGATACTG ACAAACCTTT ACTT...GGAC AACGTTGGTG TTCTTCTTCG TG | 210 | — |
| S. anginosus | CCAGAA CGTGAcACTG ACAAACCaTT gCTT...AGAt AACGTaGGgG TTCTTCTTCG TG | 211 | — |
| S. anginosus | CCAGAA CGTGATACTG ACAAACCaTT gCTT...AGAt AACGTaGGgG TTCTTCTTCG TG | 221 | — |
| S. bovis | CCAaAA CGTGATACTG ACAAACCaTT gCTT...GGAt AACGTTGCTG TTCTTCTTCG TG | 212 | — |
| S. gordonii | CCAGAA CGTGAcACTG ACAAACCaTT gCTT...AGAt AAtGTaGGTG TcCTTCTTCG TG | 223 | — |
| S. mutans | CCAGAA CGTGATACTG ACAAgCCgcT cCTT...GGAt AAtGTTGGTG TTCTcCTTCG TG | 224 | — |
| S. pneumoniae | CCAGAA CGTGAcACTG ACAAACCaTT gCTT...AGAt AACGTaGGTG TcCTTCTTCG TG | 145^{a} | — |
| S. sanguinis | CCAGAA CGcGATACTG ACAAgCCaTT gCTT...GGAC AACGTaCGTG TgCTTCTcCG TG | 227 | — |
| S. sobrinus | CCAaAA CCcGATACTG AtAAgCCaTT gCTT...AGAt AACGTTGGTG TgCTTCTTCG TG | 228 | — |
| B. cepacia | CCGGAg CGTGcagtTG ACggcgCgTT cCTG...CGAC AACGTTGGTa TcCTgCTgCG cG | 16 | — |
| B. fragilis | CCTccg CGcCATgtTG AtAAACCTTT ctTG...TGAC AACGTaGGTc TgtTgcTTCG TG | — | P33165 |
| B. subtilis | CCAGAA CGcGAcACTG AaAAACCaTT caTG...TGAC AACaTTGGTG ccCTTCTTCG cG | — | Z99104 |
| C. diphtheriae | CCAGAg CGTGAgACcG ACAAgCCaTT cCTC...CGAC AACtgTGGTc TgcTTCTcCG TG | 662 | — |
| C. trachomatis | CCAGAA aGaGAaAtTG ACAAgCCTTT cTTA...AGAg AAtGTTGGat TgcTcCTcaG aG | 22 | — |
| E. coli | CcAGAg CGTGcgAtTG ACAAgCCgTT cCTg...TGAg AACGTaGGTG TTCTgCTgCG TG | 78 | — |
| G. vaginalis | CCAact CacGATctTG ACAAgCCaTT cTTg...CGAt RACacTGGTc TTCTTCTcCG cG | 135^{a} | — |
| S. aureus | CCAGAA CGTGATtCTG ACAAACCaTT cATg...TGAC AACaTTGGTG catTatTaCG TG | 179 | — |
| Selected sequence | GAA CGTGATACTG ACAAACCTTT A | 549 | |
| for species- | | | |
| specific primer | | | |
| Selected sequence | C AACGTTGGTG TTCTTCTTC | 550 | |
| for species- | | | |
| specific primer^{b} | | | |

The sequence numbering refers to the Streptococcus agalactiae tuf gene fragment (SEQ ID NO. 209).
Nucleotides in capitals are identical to the selected sequences or match those sequences.
Mismatches are indicated by lowercase letters.
Dots indicate gaps in the sequences displayed.
“R” “Y” “M” “K” “W” and “S” designate nucleotide positions which are degenerated.
“R” stands for A or G;
“Y” stands for C or T;
“M” stands for A or C;
“K” stands for G or T;
“W” stands for A or T;
“S” stands for C or G.
“I” stands for inosine which is a nucleotide analog that can bind to any of the four nucleotides A, C, G or T.
^{a}SEQ ID NO. refers to previous patent publication WO98/20157.
^{b}This sequence is the reverse-complement of the selected primer.

ANNEX IX

Strategy for the selection of Streptococcus agalactiae-specific
hybridization probes from tuf sequences.

| | | |
|---|---|---|
| 401 431 433 | SEQ ID NO.: | Accession #: |

| S. acidominimus | GGTACTGT TaaaGTtAAt GACGAAGTTG AAATCGTTGG TATcAAAGAc | 206 | — |
|---|---|---|---|
| S. agalactiae | GGTACTGT TCGTGTCAAC GACGAAGTTG AAATCGTTGG TATTAAAGAA | 209 | — |
| S. agalactiae | GGTACTGT TCGTGTCAAC CACGAAGTTG AAATCGTTGG TATTAAAGAA | 144^{a} | — |
| S. agalactiae | GGTACTGT TCGTGTCAAC GACGAAGTTG AAATCGTTGG TATTAAAGAA | 207 | — |
| S. agalactiae | GGTACTGT TCGTGTCAAC GACGAAGTTG AAATCGTTGG TATTAAAGAA | 210 | — |
| S. agalactiae | GGTACTGT TCGTGTCAAC GACGAAGTTG AAATCGTTGG TATTAAAGAA | 208 | — |
| S. anginosus | GGTACTGT TaaaGTCAAC GACGAAGTTG AAATCGTTGG TATccgtGAt | 211 | — |
| S. anginosus | GGTACTGT TaaaGTCGAC GAtGAAGTTG AAATCGTTGG TATCcgcGAg | 221 | — |
| S. bovis | GGTACTGT TaaaGTCAAC GACGAAGTTG AAATCGTTGG TATccgtGAc | 212 | — |
| S. anginosus | GGTACTGT TaaaGTCAAt GAtGAAGTTG AAATtGTTGG TATTCgtGAc | 213 | — |
| S. cricetus | GGTACTGT TaagGTCAAt GACGAAGTTG AAATCGTTGG TATcAAgGAc | 214 | — |
| S. cristatus | GGTACTGT TCGTGTCAAC GAtGAAaTcG AAATCGTTGG TATCAAAGAA | 215 | — |
| S. downei | GGTACTGT TaagGTCAAC GACGAAGTTG AAATCGTTGG TATcAAgGAC | 216 | — |
| S. dysgalactiae | GGTACTGT TCGTGTCAAC GACGAAaTcG AAATCGTTGG TATCAAAGAA | 217 | — |
| S. equi equi | GGTACTGT TCGTGTtAAC GACGAASTcG AAATCGTTGG TATcAgAGAc | 218 | — |
| S. ferus | GGTACTGT aaGaGTCAAC GAtGAAGTTG AAATCGTTGG TATcAAAGAC | 219 | — |
| S. gordonii | GGTAtcGT TaaaGTCAAt GACGAAaTcG AAATCGTTGG TATcAAAGAA | 220 | — |
| S. macacae | GGTACTGT TaagGTtAAt GAtGAAGTTG AAATCGTTGG TATTcgtGAc | 222 | — |
| S. gordonhi | GGTAtcGT TaaaGTCAAC GACGAAaTCG AAATCGTTGG TATCAAAGAA | 223 | — |
| S. mutans | GGTACTGT TaaaGTtAAC GAtGAAGTTG AAATCGTTGG TATccgtGAt | 224 | — |
| S. oralis | GGTACTGT TCGTGTCAAC GACGAAaTcG AAATCGTTGG TATCAAAGAA | — | 233170 |
| S. parasanguinis | GGTgtTGT TCGTGTCAAt GAtGAAaTcG AAATCGTTGG TATcAAAGAA | 225 | — |
| S. pneumnoniae | GGTAtcGT TaaaGTCAAC GACGAAaTCG AAATCGTTGG TATcAAAGAA | 149 | — |
| S. pyogenes | GGTACTGT TCGTGTCAAC GACGAAaTcG AAATCGTTGG TATcAAAGAA | — | Genome project |
| S. ratti | GGTACTGT TaaaGTCAAt GACGAAGTTG AAATCGTTGG TATccgtGAt | 226 | — |
| S. salivarius | GGTgtTGT TCGTGTCAAt GACGAAGTTG AAATCGTTGG TCTTAAAGAA | 146 | — |
| S. sanguinis | GGTAtcGT TaaaGTCAAC GACGAAaTcG AAATCGTTGG TATcAAAGAA | 227 | — |
| S. sobrinus | GGTACTGT TaagGTtAAC GACGAAGTTG AAATCGTTGG TATccgtGAc | 228 | — |
| S. suis | GGTACTGT TCGTGTCAAC GACCAAaTcG AAATCGTTGG TcTTcAAGAA | 229 | — |
| S. uberis | GGTACTGT TCGTGTCAAC GACGAAaTTG AAATCGTTGG TATcAAAGAA | 230 | — |
| S. vestibularis | GGTgtTGT TCGTGTtAAt GACGAAGTTG AAATCGTTGG TcTTAAAGAA | 231 | — |
| Selected sequences | ACTGT TCGTGTCAAC GACGAAGTTG AAA | 582 | |
| for species-specific | CGTTGG TATTAAAGAA | 583 | |
| hybridiation probes^{b} | | | |
| | 470 | SEQ ID NO.: | Accession #: |
| S. acidominimus | GAaATCtctA AAGCGGTTGT TA | 206 | — |
| S. agalactiae | GATATCCAAA AAGCAGTTGT TA | 209 | — |
| S. agalactiae | GATATCCAAA AAGCAGTTGT TA | 144^{a} | — |
| S. agalactiae | GATATCCAAA AAGCAGTTGT TA | 207 | — |
| S. agalactiae | GATATCCAAA AAGCAGTTGT TA | 210 | — |
| S. agalactiae | GATATCCAAA AAGCAGTTGT TA | 208 | — |
| S. anginosus | GAaATCCAAA AAGCAGTTGT TA | 211 | — |
| S. anginosus | GAaATCCAAA AAGCAGTTGT TA | 221 | — |
| S. bovis | GAcATCCAAA AAGCtGTTGT TA | 212 | — |
| S. anginosus | GAAATCCAAA AAGCAGTTGT TA | 213 | — |
| S. cricetus | GAeATCCAAA AAGCgGTTGT TA | 214 | — |
| S. cristatus | GAaATCCAAA AAGCAGTTGT TA | 215 | — |
| S. downei | GAaATCCAAA AAGCAGTTGT TA | 216 | — |
| S. dysgalactiae | GAaActaAAA AAGCtGTTGT TA | 217 | — |
| S. equi equi | GAgATCaAAA AAGCAGTTGT TA | 218 | — |
| S. ferus | GAaATCactA AAGCAGTTQT TA | 219 | — |
| S. gordonii | GAaATCCAAA AAGCAGTTGT TA | 220 | — |
| S. macacae | GATATtCAAA AAGCAGTTGT TA | 222 | — |
| S. gordonhi | GAaActCAAA AAGCAGTTGT TA | 223 | — |
| S. mutans | GAcATtCAAA AAGCtGTTGT TA | 224 | — |
| S. oralis | GAaActCAAA AAGCAGTTGT TA | — | 233170 |
| S. parasanguinis | GAaATCCAAA AAGCAGTTGT TA | 225 | — |
| S. pneumnoniae | GAaActCAAA AAGCAGTTGT TA | 149 | — |
| S. pyogenes | GAaActaAAA AAGCtGTTGT TA | — | Genome project |
| S. ratti | GAcATCCAAA AAGCtGTTGT TA | 226 | — |
| S. salivarius | GACATCCAAA AAGCAGTTGT TA | 146 | — |
| S. sanguinis | GAaATCCAAA AAGCAGTTGT TA | 227 | — |
| S. sobrinus | GATATCCAAA AAGCAGTTGT TA | 228 | — |
| S. suis | GAaAaatctA AAGCAGTTGT TA | 229 | — |
| S. uberis | GAaActaAAA AAGCAGTTGT TA | 230 | — |
| S. vestibularis | GAaATCCAAA AAGCAGTTGT TA | 231 | — |
| Selected sequences | | | |
| for species-specific | GATATCCAAA AAGCAGTTG | 583 | |
| hybridization probes^{b} | | | |

The sequence numbering refers to the Streptococcus agalactiae tuf gene fragment (SEQ ID NO. 209).
Nucleotides in capitals are identical to the selected sequences or match those sequences.
Mismatches are indicated by lowercase letters.
Dots indicate gaps in the sequences displayed.
^{a}The SEQ ID NO. refers to previous patent publication WO98/20157.
^{b}These sequences are the reverse-complement of the selected probes.

ANNEX X

Strategy for the selection of Streptococcus agalactiae-specific
amplification primers from atpD sequences.

| | |
|---|---|
| 39 80 203 | SEQ ID NO.: |

| | | |
|---|---|---|
| S. agalactiae | TT GATTGTCTAT AAAAATGGCG ATAAGTCACA AAAAGTAGTA...TAAGGATA CTTTGGGTCG | 380 |
| S. agaiactlae | TT GATTGTCTAT AAAAATGGCG ATAAGTCACA AAAAGTAGTA...TAAGGATA CTTTGGGTCG | 379 |
| S. agaiactlae | TT GATTGTCTAT AAAAATGGCG ATAAGTCACA AAAAGTAGTA...TAAGGATA CTTTGGGTCG | 381 |
| S. agaiactlae | TT GATTGTCTAT AAAAATGGCG ATAAGTCACA AAAAGTAGTA...TAAGGATA CTTTGGGTCG | 382 |
| S. agaiactlae | TT GATTGTCTAT AAAAATGGCG ATAAGTCACA AAAAGTAGTA...TAAGGATA CTTTGGGTCG | 383 |
| S. bovis | TT GATTGTtTAT AAAAATGGCG ATAAGTCtCA AAAAaTAGTg...TAAaGAaA CTTTGGGTCG | -^{a} |
| S. salivarius | TT GgTCGTtTAT ActgATGaac AaAAGTCtaA AcgtaTcGTg...TAAaGATA CccTtGGaCG | 387 |
| S. pneumoniae | cT tgTCGTCTAC AAAgATGaCG AaAgaaaAac AAAAaTcGTc...TAAaGAaA CTTTGGGaCG | -^{b} |
| S. pyogenes | TT GATTGTtTAT AAAgATaGtG ATAAaaagCA AAAAaTcGTc...TAAaGAaA CTTTGGGaCG | -^{c} |
| S. anginosus | cT tgTaGTCTAT AAAAATGaCG AaAktaaAtc AAAAaTcGTc...gAAaGAaA CacTtGGTCG | 386 |
| S. sanguinis | cT tgTaGTCTAT AAAAATGatG AgAAaaaAtc AAAAaTcGTc...aAAGGAaA CTcTaGGcCG | -^{d} |
| S. mutans | TT GgTcGTtTAT AAAgATGGCG AcAAGTCtCA AAgAaTtGTt...aAAaGAaA CacTaGGTCG | -^{e} |
| B. anthracis | gT aAaacagagc AAcgAaaaCG gaAcaagcat tAActTkacA...TgAtGcaA CacTtGGTCG | 247 |
| B. cereus | gT akaacaaagc AAcgAaaaCG g...aagcat gAActTAacA...TgAtGcaA CacTtGGaCG | 248 |
| E. faecium | TT agTTGTtTAT AAAAATGaCG AaAAtaaAtc AAAAGTtGTt...TAAaGAaA CaTTaGGTCG | 292 |
| E. galilnarum | TT GATcGTtTAc AAAAAaGaCG AgAAaaaAac AAAAGTAGTA...aAcaGATA CTCTaGGcCG | 293 |
| S. faecalis | TT agTcGTtTAT AAAAATGGCG AagcaaaACA AAAAGTAGTA...TAAaGATA CaTTaGGTCG | 291 |
| E. coli | Ta cgaTGctctT gAggtgcaaa ATggtaatgA gcgtcTgGTg...TAAaGcgA CTcTGGGcCG | -^{f} |
| L. monocytogenes | Ta tAaatctgAT gcAgAaGaaG cacccaCtag ccAAcTtact...TAcaGtaA CTcTtGGTCG | 324 |
| S. aureus | gT tATTGatgtg cctAAaGaaG AaggtaCAat AcAAcTAacA...TgAtGAaA CaTTaGGTCG | 366 |
| S. epidermidis | ca cATcGaagtT cctAAaGaaG ATggagcgCt tcAAtTAacA...TgAcGtaA CTcTaGGaaG | 370 |
| Selected sequences | ATTGTCTAT AAAAATGGCG ATAAGTC | 627 |
| or species- | AAAATGGCG ATAAGTCACA AAAAGTA | 628 |
| specific primer | | |
| Selected sequences | GGATA CTTTGGGTCG | 625 |
| for species- | | |
| specific primers^{g} | | |

| | |
|---|---|
| 234 368 399 | SEQ ID NO.: |

| | | |
|---|---|---|
| S. agalactiae | TGTCTTCAAC GTTC...CTT ATTAGCACCT TACTTAAAAG GTGGTAAAG | 380 |
| S. agaiactlae | TGTCTTCAAC GTTC...CTT ATTAGCACCT TACTTAAAAG GTGGTAAAG | 379 |
| S. agaiactlae | TGTCTTCAAC GTTC...CTT ATTAGCACCT TACTTAAAAG GTGGTAAAG | 381 |
| S. agaiactlae | TGTCTTCAAC GTTC...CTT ATTAGCACCT TACTTAAAAG GTGGTAAAG | 382 |
| S. agaiactlae | TGTCTTCAAC GTTC...CTT ATTAGCACCT TACTTAAAAG GTGGTAAAG | 383 |
| S. bovis | TGTgTTtAAt GTTC...CcT tcTtGCcCCT TACcTAAAAG GTGGTAAAG | -^{a} |
| S. salivarius | TGTCTTtAAC GTTC...CTT gcTAGCcCCT TACcTtAAgG GTGGTAAAG | 387 |
| S. pneumoniae | TGTCTTCAAC GTTt...CcT tcTtGCcCCT TACcTtAAAG GTGGThAAG | -^{b} |
| S. pyogenes | cGTCTTtAAt GTaC...CcT tcTtGCCCCT TACcTtAAAG GTGGTAAAG | -^{c} |
| S. anginosus | cGTCTTtAAC GTTt...CcT tTTAGCcCCc TACcTcAAAG GTGGgAAAG | 386 |
| S. sanguinis | gGTgTTCAAt GTTt...CcT gcTAGCACCT TAtcTgAAAG GTGGgAAAG | -^{d} |
| S. mutans | TGTCTTtAAt GTTC...CcT tcTtGCcCCT TAtcTtAAAG GTGGTAAAG | -^{e} |
| B. anthracis | TGTaTTtAAC GTaT...CTT AcTtGCtCCT TACaTtAAgG GTGGTAAga | 247 |
| B. cereus | TGTaTTCAAC GTat...CTT AcTtGCtCCT TACaTtAAgG GTGGTAAga | 248 |
| E. faecium | cGTaTTCAAC GTaC...tTT gcTtGCcCCa TAtTTAAAAG GTGGgAAAG | 292 |
| E. galilnarum | aGTaTTtAAt GTaC...tTT ATTAGCtCCT TACTTAAAAG GTGGTAAAG | 293 |
| S. faecalis | TGTgTTtAAC GTTt...CTT ATTAGCACCT TAtcTAAAAG GTGGTAAAG | 291 |
| E. coli | TaTCaTgAAc GTaC...CcT gaTgtgtCCg TtCgctAAgG GcGGTAAAG | -^{f} |
| L. monocytogenes | TGTaTTtAAt GTat...CTT gcTAGCtCCT TACTTAAAAG GTGGTAAAa | 324 |
| S. aureus | TGTaTTtAAt GTaC...tTT AcTAGCACCT TAtaTtAAAG GTGGTAAAa | 366 |
| S. epidermidis | aGTgTTtAAC GTaC...CTT ATTAGCACCT TACaTAAAAG GTGGTAAAa | 370 |
| Selected sequences | | |
| or species- | | |
| specific primer | | |
| Selected sequences | TGTCTTCAAC G | 625 |
| for species- | ATTAGCACCT TACTTAAAAG GTGGTA | 626 |
| specific primers^{g} | | |

The sequence numbering refers to the Streptococcus agallactiae tuf gene fragment (SEQ ID NO. 380).
Nucleotides in capitals are identical to the selected sequences or match those sequences.
Mismatches are indicated by lower-case letters.
Dots indicate gaps in the sequences displayed.
^{a, d, e, f} These sequences were obtained from Genbank and have accession #: a = AB009314, d = AF001955, e = U31170, and f = V00311.
^{b, c} These seouences were obtained from qenome sequencing projects,
^{g} These secquences are the reverse-complement or the selected primers.

ANNEX XI

Strategy for the selection of Candida albicans/dabliniensis-specific
amplification primers, Candida albicans-specific hybridization probe
and Candida dubliniensis-specific hybridization probe from tuf sequences.

| | | SEQ ID | |
|---|---|---|---|
| | 337 368 403 | NO. | Accession #: |
| C. albicans | CGTC AAGAAGGTTG GTTACAACCC AAAGACTG...CAACATGA TTGAACCATC | 624 | — |
| C. albicans | CGTC AAGAAGGTTG GTTACAACCC AAAGACTG...CAACATGA TTGAACCATC | 409 | — |
| C. albicans | CGTC AAGAAGGTTG GTTACAACCC AAAGACTG...CAACATGA TTGAACCATC | 410 | — |
| C. albicans | CGTC AAGAAGGTTG GTTACAACCC AAAGACTG...CAACATGA TTGAACCATC | 407 | — |
| C. albicans | CGTC AAGAAGGTTG GTTACAACCC AAAGACTG...CAACATGA TTGAACCATC | 408 | — |
| C. dubliniensis | CGTC AAGAAGGTTG GTTACAACCC AAAGACTG...CAACATGA TTGAAgCtTC | 412 | — |
| C. dubliniensis | CGTC AAGAAGGTTG GTTACAACCC AAAGACTG...CAACATGA TTGAAgCtTc | 414 | — |
| C. dubliniensis | CGTC AAGAAGGTTG GTTACAACCC AAAGACTG...CAACATGA TTGAAgCtTC | 415 | — |
| C. glabrata | CATC AAGAAGGTcG GTTACAACCC AAAGACTG...CAACATGA TTGAAgCcaC | 417 | — |
| C. guilliermondii | CGTC AAGAAGGTTG GTTACAACCC tAAGACTG...CAACATGA TTGAggCtTC | 418 | — |
| C. kefyr | CATC AAGAAGGTcG GTTACAACCC AAAGACTG...CAACATGA TTGAAgCcaC | 421 | — |
| C. krusei | CATC AAGAAGGTTG GTTACAACCC AAAGACTG...CAACATGA TTGAAgCATC | 422 | — |
| C. lusitaniae | CGTC AAGAAGGTTG GTTACAACCC tAAGACTG...CAACATGA TTGAgCCATc | 424 | — |
| C. neoformans | CATC AAGAAGGTTG GTTACAACCC CAAGgCTG...CAACATGt TgGAggagaC | 623 | — |
| C. parapsilosis | CGTC AAGAAGGTTG GTTACAACCC tAAagCTG...CAAtATGA TTGAACCATC | 426 | — |
| C. tropicalis | CGTC AAGAAGGTTG GTThCAACCC tAACgCTG...CAACATGA TTGAAgCtTC | 429 | — |
| A. fumigatus | CATC AAGAAGGTCG GCTACAACCC cAAGgCCG...CAACATGc TTGAgCCcTC | 404 | — |
| Human | CATt AAGAAaaTTG GcTACAACCC CgAcACAG...CAACATGc TgGAgCCAag | — | X035S8 |
| P. anomale | TATC AAGAAaGTTG GTTACAACCC AAAaACTG...TAACATGA TTGAACCATC | 447 | — |
| S. cerevisiae | TATC AAGAAGGTTG GTTACAACCC AAAGACTG...CAACATGA TTGAAgCtaC | 622 | — |
| S. pombe | CATC AAGAAGGTcG GTTtCAACCC cAAGACCG...TAACATGA TTGAgCCcAC | — | 042189 |
| Selected sequence | C AAGAAGGTTG GTTACAACCC AAAGA | | |
| for species-specific | | | |
| amplification primer^{a} | | | |
| Selected sequence | | | |
| for species-specific | | | |
| amplification primer^{a, b} | | | |
| Selected sequences | CATGA TTGAACCtTC | 577 | |
| for species-specific | CATGA TTGAAGCTTC | 578 | |
| hybridization probes | | | |

| | | SEQ ID | |
|---|---|---|---|
| | 428 460 491 | NO.: | Accession #: |
| C. albicans | CACCAACT...C AAATCCGGTA AAGTTACTCG TAAGACCTTG T | 624 | — |
| C. albicans | CACCAACT...C AAATCCGGTA AAGTTACTGG TAAGACCTTG T | 409 | — |
| C. albicans | CACCAACT...C AAATCCGGTA AAGTTACTGG TAAGACCTTG T | 410 | — |
| C. albicans | CACCAACT...C AAATCCGGTA AAGTTACTGG TAAGACCTTG T | 407 | — |
| C. albicans | CACCAACT...C AAATCCGGTA AAGTTACTGG TAAGACCTTG T | 408 | — |
| C. dubliniensis | CACCAACT...C AAATCCGGTA AgGTTACTGG TAAGACCTTG T | 412 | — |
| C. dubliniensis | CACCAACT...C AAATCCGGTA AgGTTACTGG TAAGACCTTG T | 414 | — |
| C. dubliniensis | CACCAACT...C AAATCCGGTA AgGTTACTGG TAAGACCTTG T | 415 | — |
| C. glabrata | CACCAACG...C AAggCtGGTg tcGTcAagGG TAAGACCTTG T | 417 | — |
| C. guilliermondii | tACCAACT...C AAggCtGGTA AgtccACcGG TAAGACtTTG T | 418 | — |
| C. kefyr | CACCAACG...C AAggCtGGTA ccGTcAagGG TAAGACCTTG T | 421 | — |
| C. krusei | CACCAACT...C AAggcaGGTg ttGTTAagGG TAAGACCTTA T | 422 | — |
| C. lusitaniae | YACCAACT...C AAgTCYGGTA AgtccACcGG TAAGACCTTG T | 424 | — |
| C. neoformans | CACCAAGT...C AAgTCtGGTg tttccAagGG TAAGACCcTC C | 623 | — |
| C. parapsilosis | aACCAACT...T AAAgCtGGTA AgGTTACcGG TAAGACCTTG T | 426 | — |
| C. tropicalis | tACCAACT...C AAggCtGGTA AqGTTACcGG TAAGACtTTG T | 429 | — |
| A. fumigatus | CtCCAACT...C AAggCCGGcA AgGTcACTGG TAAGACCcTC A | 404 | — |
| Human | tgCtAACA...T AAggatGGcA AtGcCAgTCG aAccACgcTG C | — | X035S8 |
| P. anomale | aWCtAACT...C AAAgctGGTg AAGcTAaacG TAAaACtTTA T | 447 | — |
| S. cerevisiae | CACCAACG...C AAggcCGGtg tcGTcAagGG TAAGACtTTG T | 622 | — |
| S. pombe | CACCAACA...C AAggCtGGTg tcGTcAagGG TAAGACtcTT T | — | 042189 |
| Selected sequence | | | |
| for species-specific | | | |
| amplification primer^{a} | | | |
| Selected sequence | ATCCGGTA AAGTTACTGG TAAGACCT | | |
| for species-specific | | | |
| amplification primer^{a, b} | | | |
| Selected sequences | CACCA (C. albicans) | 577 | |
| for species-specific | CACCA (C. dublinensis) | 578 | |
| hybridiaation probes | | | |

The sequence nunbering refers to the Candida albicans tuf gene fragment (SEQ ID NO. 408).
Nucleotides in capitals are identical to the selected sequences or match those sequences.
Mismatches for SEQ ID NO. 577 are indicated by lower-case letters.
Mismatches for SEQ ID NO. 578 are indicated by underlined nucleotides
Dots indicate gaps in the sequences displayed.
“R” “Y” “M” “K” “W” “W” and “S” designate nucleotide positions which are degenerated.
“R” stands for A or G;
“Y” stands for C or T;
“M” stands for A or C;
“K” stands for G or T;
“W” stands for A or T;
“S” stands for C or G.
“I” stands for inosine which is a nucleotide analog that can bind to any of the four nucleotides A, C, G or T.
^{a}C. albicans primers have been described in a previous patent (publication WO98/20157, SEQ ID NOs. 11-12)
^{b}This sequence is the reverse-complement of the selected primer.

ANNEX XII

Strategy for the selection of Staphylococcus-specific
amplification primers from tuf sequences.

| | | |
|---|---|---|
| 310 340 652 | SEQ ID NO. | Accession #: |

| | | | |
|---|---|---|---|
| S. aureus | A CAGGCCGTGT TGAACGTGGT CAAATCAAAG...CACTTACCA GAAGGTACTG | 179 | — |
| S. aureus | A CAGGCCGTGT TGAACGTGGT CAAATCAAAG...CACTTACC~ ~~~~~~~~~~ | 176 | — |
| S. aureus | A CAGGCCGTGT TGAACGTGGT CAAATCAAAG...CACTTACCA GAAGGTMCTG | 177 | — |
| S. aureus aureus | A CAGGCCGTGT TGAACGTGGT CAAATCAAAG...CACTTACCA GAAGGTACTG | 180 | — |
| S. auricularis | A CAGGCCGTGT TGAACGTGGT CAAATCAAAG...ActTTACCA GAAGGTACaG | 181 | — |
| S. capitis capitis | A CAGGCCGTGT TGAACGTGGT CAAATCAAAG...AACTTACCA CAAGGTACTG | 182 | — |
| M. caseolyticus | A CTGGaCGTGT TGAgCGTGGa CAAATCAAAG...AACTTACCA GAAGGTACTG | 183 | — |
| S. cohnii | A CAGGgCGTGT TGAACCTGGT CAAATCAAAG...ActTTACCA GAAGGTACTG | 184 | — |
| S. epidermidis | A CAGGCCGTGT TGAACGTGGT CAAATCAAAG...~~~~~~~~~ ~~~~~~~~~~ | 185 | — |
| S. epidermidis | A CAGGCCGTGT TGAACGTGGT CAAATCAAAG...AACTTACCA GAAGGTACaG | 141^{a} | — |
| S. haemoiyticus | A CAGGCCGTGT TGAACGTGGT CAAATCAAAG...AACTTACCA GAAGGTACTC | 186 | — |
| S. haemoiyticus | A CAGGtCGTGT TGAACGTGGT CAAATCAAAG...AACTTACCA GAAG~~~~~~ | 188 | — |
| S. haemolytlcus | A CAGGCCGTGT TGAACGTGGT CAAATCAAAG...AACTTACCA GAAGGTACTG | 189 | — |
| S. hominis hominis | A CAGGCCGTGT TGAACGTGGT CAAATCAAAG...AACTTACCA GAAGGTACTG | 191 | — |
| S. hominis | A CAGGCCGTGT TGAACGTGGT CAAATCAAAG...AACTTACCA GAAGGTACTG | 193 | — |
| S. hominis | A CAGGCCGTGT TGAACGTGGT CAAATCAAAG...AACTTACCA GAAGG~~~~~ | 194 | — |
| S. hominis | A CAGGCCGTGT TGAACGTGGT CAAATCAAAG...AACTTACCA GAAGGTACTG | 195 | — |
| S. hominis | A CAGGCCGTGT TGAACGTGGT CAAATCAAAG...AACTTACCA GAAGGTACTG | 196 | — |
| S. lugdunensis | A CAGGCCGTGT TGAACGTGGT CAAATCAAAG...AACTTACCA GAAGGTACaG | 197 | — |
| S. saprophyticus | A CAGGCCGTGT TGAACGTGGT CAAATCAAAG...~~~~~~~~~ ~~~~~~~~~~ | 198 | — |
| S. saprophyticus | A CAGGCCGTGT TGAACGTGGT CAAATCAAAG...AACTTACCA GAAGGTACTG | 199 | — |
| S. saprophyticus | A CAGGCCGTGT TGAACGTGGT CAAATCAAAG...AACTTACCA GAAGGTACTG | 200 | — |
| S. sciuri sciuri | A CAGGCCGTGT TGAACGTGGT CAAATCACTG...AACTTACCA GAAGGTACTG | 201 | — |
| S. warneri | A CAGGCCGTGT TGAACGTGGT CAAATCAAAG...CAaTTACCA GAAGGTACTG | 187 | — |
| S. warneri | A CAGGCCGTGT TGAACCTGGT CAAATCAAAG...~~~~~~~~~ ~~~~~~~~~~ | 192 | — |
| S. warneri | A CAGGCCGTGT TGAACGTGGT CAAATCAAAG...CAaTTACCA GAAGGTACTG | 202 | — |
| B. subtills | A CTGGCCGTGT aGAACGcCGa CAAATCAAAG...CAtCTtCCA GAAGGcgtaG | — | Z99104 |
| E. coli | A CCGGtCGTGT aGAACGcGGT atcATCAAAG...GAaCTgCCg GAAGGcgtaG | 78 | — |
| L. monocytogenes | A CTGGaCGTGT TGAACGTGGa CAAgTtAAAG...AcacTtCCA GAAGGTACTG | 138^{a} | — |
| Selected sequence | GGCCGTGT TGAACCTCGT CAAATCA | 553 | |
| for genus-specific | | | |
| primer | | | |
| Selected sequences | TTACCA GAAGGTACTG | 575 | |
| for genus-specific | TTACCA GAAGGTACTG | 707 | |
| primers^{b} | | | |

| | | |
|---|---|---|
| 682 | SEQ ID NO.: | Accession #: |

| | | | |
|---|---|---|---|
| S. aureus | AAATGGTAAT GC | 179 | — |
| S. aureus | ~~~~~~~~~~ GC | 176 | — |
| S. aureus | AAATGGTAAT GC | 177 | — |
| S. aureus aureus | AAATGGTAAT GC | 180 | — |
| S. auricularis | AAATGGTAAT GC | 181 | — |
| S. capitis capitis | AAATGGTTAT GC | 182 | — |
| M. caseolyticus | AAATGGTAAT CC | 183 | — |
| S. cohnii | AAATGGTTAT GC | 184 | — |
| S. epidermidis | ~~~~~~~~~~ ~~ | 185 | — |
| S. epidermidis | AAATGGTTAT GC | 141^{a} | — |
| S. haemoiyticus | AAATGGTTAT GC | 186 | — |
| S. haemoiyticus | ~~~~~~~~~~ ~~ | 188 | — |
| S. haemolytlcus | AAATGG~~~~ ~~ | 189 | — |
| S. hominis hominis | AAATGGTAAT GC | 191 | — |
| S. hominis | AAATGGTAAT CC | 193 | — |
| S. hominis | ~~~~~~~~~~ ~~ | 194 | — |
| S. hominis | AAATGGTAAT CC | 195 | — |
| S. hominis | AAATGGTAAT GC | 196 | — |
| S. lugdunensis | AAATGGTTAT GC | 197 | — |
| S. saprophyticus | ~~~~~~~~~~ ~~ | 198 | — |
| S. saprophyticus | AAATGGTTAT GC | 199 | — |
| S. saprophyticus | AAATGGTTAT GC | 200 | — |
| S. sciuri sciuri | AAATGGTTAT GC | 201 | — |
| S. warneri | ~~~~~~~~~~ ~~ | 187 | — |
| S. warneri | ~~~~~~~~~~ ~~192 | — | |
| S. warneri | AAATGGTTAT CC | 202 | — |
| B. subtills | AAATGGTTAT GC | — | Z99104 |
| E. coli | AgATGGTAAT CC | 78 | — |
| L. monocytogenes | AAATGGTAAY GC | 138^{a} | — |
| Selected sequence | | | |
| for genus-specific | | | |
| primer | | | |
| Selected sequences | AAATGGTIA | 575 | |
| for genus-specific | AAATGGTWA | 707 | |
| primers^{b} | | | |

The sequence numbering refers to the Staphylococcus aureus tuf gene fragment (SEQ ID NO. 179).
Nucleotides in capitals are identical to the selected sequences or match those sequences.
Mismatches are indicated by lowercase letters.
“~” indicate incomplete sequence data.
Dots indicate gaps in the sequences displayed.
“R” “Y” “N” “K” “W” and “S” designate mucleotide positions which are degenerated.
“R” stands for A or C;
“Y” stands for C or T;
“M” stands for A or C;
“K” stands for G or T;
“N” stands for A or T;
“S” stands for C or G.
“I” stands for inosine which is a nucleotide analog that can bind to any of the four nucleotides A, C, G or T.
^{a}The SEQ ID NO. refers to previous patent publication WO98/20157.
^{b}These sequences are the reverse-complement of the selected primers.

ANNEX XIII

Strategy for the selection of the Staphylococcus-
specific hybridization probe from tuf sequences.

| | | |
|---|---|---|
| 400 425 | SEQ ID NO.: | Accession #: |

| | | | |
|---|---|---|---|
| S. aureus | G TTGAAATGTT CCGTAAATTA TTAGA | 179 | — |
| S. aureus | G TTGAAATGTT CCGTAAATTA TTAGA | 176 | — |
| S. aureus | G TTGAAATGTT CCGTAAATTA TTAGA | 177 | — |
| S. aureus | G TTGAAATGTT CCGTAAATTA TTAGA | 178 | — |
| S. aureus aureus | G TTGAAATGTT CCGTAAATTA TTAGA | 180 | — |
| S. auricularis | G TAGAAATGTT CCGTAAATTA TTAGA | 181 | — |
| S. capitis capitis | G TAGAAATGTT CCGTAAATTA TTAGA | 182 | — |
| M. caseolyticus | G TAGAAATGTT CCGTAAATTA TTAGA | 183 | — |
| S. cohnii | G TAGAAATGTT CCGTAAATTA TTAGA | 184 | — |
| S. epidermidis | G TAGAAATGTT CCGTAAATTA TTAGA | 185 | — |
| S. haemolyticus | G TAGAAATGTT CCGTAAATTA TTAGA | 186 | — |
| S. haemolyticus | G TAGAAATGTT CCGTAAATTA TTAGA | 189 | — |
| S. haemolyticus | G TAGAAATGTT CCGTAAATTA TTAGA | 190 | — |
| S. haemolyticus | G TAGAAATGTT CCGTAAATTA TTAGA | 188 | — |
| S. hominis | G TAGAAPTGTT CCGTAAATTA TTAGA | 196 | — |
| S. hominis | G TAGAAATGTT CCGTAAATTA TTAGA | 194 | — |
| S. hominis hominis | G TAGAAATGTT CCGTAAATTA TTAGA | 191 | — |
| S. hominis | G TAGAAATGTT CCGTAAATTA TTAGA | 193 | — |
| S. hominis | G TAGAAATGTT CCGTAAATTA TTAGA | 195 | — |
| S. lugdunensis | G TAGAAATGTT CCGTAAATTA TTAGA | 197 | — |
| S. saprophyticus | G TAGAAATGTT CCGTAAATTA TTAGA | 198 | — |
| S. saprophyticus | G TAGAAATGTT CCGTAAATTA TTAGA | 200 | — |
| S. saprophyticus | G TAGAAATGTT CCGTAAATTA TTAGA | 199 | — |
| S. sciuri sciuri | G TTGAAATGTT CCGTAAATTA TTAGA | 201 | — |
| S. warneri | G TAGAAATGTT CCGTAAgTTA TTAGA | 187 | — |
| S. warneri | G TAGAAATGTT CCGTAAgTTA TTAGA | 192 | — |
| S. warneri | G TAGAAATGTT CCGTAAgTTA TTAGA | 202 | — |
| S. warneri | G TAGAAATGTT CCGTAAgTTA TTAGA | 203 | — |
| B. subtilis | G TTGAAATGTT CCGTAAgcTt cTTGA | — | Z99104 |
| E. coli | G TTGAAATGTT CCGcAAAcTg cTGGA | 78 | — |
| L. monocytogenes | G TAGAAATGTT CCGTAAATTA cTAGA | 138a | — |
| Selected sequence | GAAATGTT CCGTAAATTA TT | 605 | |
| for genus-specific | | | |
| hybridization probe | | | |

The sequence numbering refers to the Staphylococcus aureus tuf gene fragment (SEQ ID NO. 179).
Nucleotides in capitals are identical to the selected sequence or match that sequence.
Mismatches are indicated by lowercase letters.
^{a}The SEQ ID NO. refers to previous patent publication WO98/20157.

ANNEX XIV

Strategy for the selection of Staphylococcus saprophyticus-
specific and of Staphylococcus haemolyticus-specific
hybridization probes from tuf sequences.

| | |
|---|---|
| 339 383 | SEQ ID NO.: |

| | | |
|---|---|---|
| S. aureus | AG TtGGTGAAGA AgTtGAAATC ATcGGTtTaC ATGACACaTC TAA | 179 |
| S. aureus | AG TtGGTGAAGA AgTtGAAATC ATcGGTtTaC ATGACACaTC TAA | 176 |
| S. aureus | AG TtGGTGAAGA AgTtGAAATC ATcGGTtTaC ATGACACaTC TAA | 177 |
| S. aureus | AG TtGGTGAAGA AgTtGAAATC ATcGGTtTaC ATGACACaTC TAA | 178 |
| S. aureus aureus | AG TtGGTGAAGA AgTtGAAATC ATcGGTtTaC ATGkCACaTC TAA | 180 |
| S. auricularis | AG TCGGTGAAGA AgTtGAAATC ATcGGTATga AaGACggTTC AAA | 181 |
| S. capitis capitis | AG TtGGTGAAGA AgTtGAAATC ATcGGTATCC AcGAaACTTC TAA | 182 |
| M. caseolyticus | AG TtGGTGAAGA AgTtGAAATC ATTGGTtTaa cTGAagaacC AAA | 183 |
| S. cohnii | AG TCGGTGAAGA AgTtGAAATC ATcGGTATgC AaGAagaTTC CAA | 184 |
| S. epidermidis | AG TtGGTGAAGA AgTtGAAATC ATcGGTATgC AcGAaACTTC TAA | 185 |
| S. haemolyticus | AG TtGGTGAAGA AgTtGAAATC ATTGGTATCC ATGACACTTC TAA | 186 |
| S. haemolyticus | AG TtGGTGAAGA AgTtGAAATC ATTGGTATCC ATGkCACTTC TAA | 189 |
| S. haemolyticus | AG TtGGTGAAGA AgTtGAAATC ATTGGTATCC ATGACACTTC TAA | 190 |
| S. haemolyticus | AG TtGGTGAAGA AgTtGAAATt ATTGGTATCa AaGAaACTTC TAA | 188 |
| S. hominis | AG TtGGTGAAGA AgTtGAAATt ATTGGTATCa AaGAaACTTC TAA | 194 |
| S. hominis hominis | AG TtGGTGAAGA AgTtGAAATt ATTGGTATCa AaGAaACTTC TAA | 191 |
| S. hominis | AG TtGGTGAAGA AgTtGAAATt ATTGGTATCa AaGAaACTTC TAA | 193 |
| S. hominis | AG TtGGTGAAGA AgTtGAAATt ATTGGTATCa AaGAaACTTC TAA | 195 |
| S. hominis | AG TtGGTGAAGA AgTtGAAATt ATTGGTATCa AaGAtACTTC TAA | 196 |
| S. lugdunensis | AG TCGGTGAAGA AgTtGAAATt ATTGGTATCC AcGAtACTaC TAA | 197 |
| S. saprophyticus | AG TCGGTGAAGA AATCGAAATC ATcGGTATgC AaGAagaaTC CAA | 198 |
| S. saprophyticus | AG TCGGTGAAGA AATCGAAATC ATcGGTATgC AaGAagaaTC CAA | 200 |
| S. saprophyticus | AG TCGGTGAAGA AATCGAAATC ATcGGTATgC AaGAagaaTC CAA | 199 |
| S. sciuri sciuri | TG TtGGTGAAGA AgTtGAAATC ATcGGTtTaa cTGAagaaTC TAA | 201 |
| S. warneri | AG TtGGTGAAGA AgTtGAAATC ATcGGTtTaC ATGACACTTC TAA | 187 |
| S. warneri | AG TtGGTGAAGA AgTtGAAATC ATcGGTtTaC ATGACACTTC TAA | 192 |
| S. warneri | AG TtGGTGAAGA AgTtGAAATC ATcGGTtTaC ATGACACTTC TAA | 202 |
| S. warneri | AG TtGGTGAAGA AgTtGAAATC ATcGGTtTaC ATGACACTTC TAA | 203 |
| B. subtilis | AG TCGGTGAcGA AgTtGAAATC ATcGGTcTtC AaGAagagag AAA | -^{a} |
| E. coli | AG TtGGTGAAGA AgTtGAAATC gTTGGTATCa AaGAgACTca GAA | 78 |
| L. monocytogenes | AG TtGGTGAcGA AgTaGAAgTt ATcGGTATCg AaGAagaaag AAA | 138^{b} |
| Selected sequences | CGGTGAAGA AATCGAAATC A (S. saprophyticus) | 599 |
| for species-specific | (S.haemolyticus) ATTGGTATCC ATGACACTTC | 594 |
| hybridization probes | | |

The sequence numbering refers to the Staphylococcus aureus tuf gene fragment (SEQ ID NO. 179).
Nucleotides in capitals are identical to the selected sequences or match those sequences.
Mismatches are indicated by lowercase letters.
^{a}This sequence was obtained from Genbank accession #Z99104.
^{b}The SEQ ID NO. refers to previous patent publication WO98/20157.

ANNEX XV

Strategy for the selection of Staphylococcus aureus-
specific and of Staphylococcus epidermidis-specific
hybridization probes from tuf sequences.

| | |
|---|---|
| 521 547 592 617 | SEQ ID NO.: |

| | | |
|---|---|---|
| S. aureus | TACACCACA TACTGAATTC AAAGCAG...TTCTTCtCa AACTATCGtC CACAATT | 179 |
| S. aureus | TACACCACA TACTGAATTC AAAGCAG...TTCTTCtC~ ~~~~~~~~~~ ~~~~~~~ | 178 |
| S. aureus | TACACCACA TACTGAATTC AAAGCAG...TTCTTCtCa AACTATCGtC CACAATT | 176 |
| S. aureus | TACACCACA TACTGAATTC AAAGCAG...TTCTTCtCa AACTATCGtC CACAATT | 177 |
| S. aureus aureus | TACACCACA TACTGAATTC AAAGCAG...TTCTTCtCa AACTATCGtC CACAATT | 180 |
| S. auricularis | TACACCACA cACTaAATTC ActGCAG...TTCTTCtCT AACTAcCGtC CACAATT | 181 |
| S. capitis capitis | CACACCACA cACTaAATTC AAAGCGG...TTCTTCAgT AACTACCGCC CACAATT | 182 |
| M. caseoiyticus | TACtCCACA TACTaAATTC AAAGCTG...TTCTTCACT AACTAcCGCC CtCAGTT | 183 |
| S. cohnii | TACACCACA cACaaAcTTt AAAGCAG...TTCTTcAgT AACTATCGCC CACAATT | 184 |
| S. epidermidis | TACACCACA cACaaAATTC AAAGCTG...TTCTTCACT AACTATCGCC CACAATT | 185 |
| S. haemolyticus | CACACCtCA cACaaAATTt AAAGCAG...TTCTTCACa AACTATCGtC CACAATT | 186 |
| S. haemolyticus | CACACCtCA cACaaAATTt AAAGCAG...TTCTTCACa AACTATCGtC CACAATT | 189 |
| S. haemolyticus | CACACCtCA cACaaAATTt AAAGCAG...TTCTTCACa AACTATCGtC CACAATT | 190 |
| S. haemolyticus | TACACCtCA cACaaAATTC AAAGCAG...TTCTTCACT AACTATCGtC CACAATT | 188 |
| S. hominis | CACACCtCA cACaaAATTC AAAGCAG...TTCTTCACT AACTATCGtC CACAATT | 195 |
| S. hominis | TACACCtCA cACaaAATTC AAAGCAG...TTCTTCACT AACTATCGtC CACAATT | 196 |
| S. hominis hominis | TACACCtCA cACaaAATTC AAAGCAG...TTCTTCtCT AACTATCGtC CACAATT | 191 |
| S. hominis | TACACCtCA cACaaAATTC AAAGCAG...TTCTTCtCT AACTATCGtC CACAATT | 193 |
| S. hominis | TACACCtCA CACaaAATTC AAAGCAG...TTCTTCtCT AACTATCGtC CACAATT | 194 |
| S. lugdunensis | TACACCtCA CACTaAATTt AAAGCTG...TTCTTCtCa AACTAcCGCC CACAATT | 197 |
| S. saprophyticus | TACACCACA TACaaAATTC AAAGCAG...TTCTTCACT AACTAeCGCC CACAATT | 198 |
| S. saprophyticus | TACACCACA TACaaAATTC AAAGCAG...TTCTTCACT AACTAcCGCC CACAATT | 199 |
| S. saprophyticus | TACACCACA TACaaAATTC AAAGCAG...TTCTTCACT AACTAcCGCC CACAATT | 200 |
| S. sciuri sciuri | CACACCtCA CACTaAATTC AAAGCTG...TTCTTCACa AACTAcCGCC CACAATT | 201 |
| S. warneri | TACACCACA TACaaAATTC AAAGCGG...~~~~~~~~~ ~~~~~~~~~~ ~~~~~~~ | 192 |
| S. warneri | TACACCACA TACaaAATTC AAACCGG...TTCTTCAgT AACTAcCGCC CACAATT | 187 |
| S. warneri | TACACCACA TACaaAATTC AAAGCAG...TTCTTCAgT AACTAcCGCC CACAATT | 202 |
| S. warneri | TACACCACA TACaaAATTC AAAGCAG...TTCTTCAgT AACTAcCGCC CACAATT | 203 |
| B. subtilis | CACtCCACA cAgCaAATTC AAAGCTG...TTCTTCtCT AACTAcCGtC CtCAGTT | -^{a} |
| E. coli | CAAgCCgCA CACcaAgTTC gAAtCTG...TTCTTCAaa ggCTAcCGtC CgCAGTT | 78 |
| L. monocytogenes | TACtCCACA CACTaAcTTC AAAGCAG...TTCTTCAac AACTAcCGCC CACAATT | 138^{b} |
| Selected sequences | ACCACA TACTGAATTC AAAG (S. aureus) | 585 |
| for species-specific | (S.epidermidis) TTCACT AACTATCGCC CACA | 593 |
| hybridization | | |
| probes | | |

The sequence numbering refers to the Staphylococcus aureus tuf gene fragment (SEQ ID NO. 179).
Nucleotides in capitals are identical to the selected sequences or match those sequences.
Mismatches are indicated by lower-case letters.
“~” indicate incomplete sequence data.
Dots indicate gaps in the sequences displayed.
^{a}This sequence was obtained from Genbank accession #Z99104.
^{b}The SEQ ID NO. refers to previous patent publication WO98/20157.

ANNEX XVI

Strategy for the selection of the
Staphylococcus hominis-specific
hybridization probe from tuf sequences.

| | |
|---|---|
| 358 383 | SEQ ID NO.: |

| | | |
|---|---|---|
| S. aureus | ATC ATcGGTtTac AtGAcACaTC TAA | 179 |
| S. aureus | ATC ATcGGTtTac AtGAcACaTC TAA | 176 |
| S. aureus | ATC ATcGGTtTac AtGAcACaTC TAA | 177 |
| S. aureus | ATC ATcGGTtTac AtGAcACaTC TAA | 178 |
| S. aureus aureus | ATC ATcGGTtTac AtGAcACaTC TAA | 180 |
| S. auricularis | ATC ATcGGTATgA AAGAcggTTC AAA | 181 |
| S. capitis capitis | ATC ATcGGTATCc AcGAAACTTC TAA | 182 |
| M. caseolyticus | ATC ATTGGTtTaA ctGAAgaacC AAA | 183 |
| S. cohnii | ATC ATcGGTATgc AAGAAgaTTC CAA | 184 |
| S. epidermidis | ATC ATcGGTATgc AcGAAACTTC TAA | 185 |
| S. haemolyticus | ATC ATTGGTATCc AtGAcACTTC TAA | 186 |
| S. haemolyticus | ATC ATTGGTATCc AtGAcACTTC TAA | 189 |
| 5: haemolyticus | ATC ATTGGTATCc AtGAcACTTC TAA | 190 |
| S. haemolyticus | ATT ATTGGTATCA AAGAAACTTC TAA | 188 |
| S. hominis | ATT ATTGGTATCA AAGAtACTTC TAA | 196 |
| S. hominis | ATT ATTGGTATCA AAGAAACTTC TAA | 194 |
| S. hominis hominis | ATT ATTGGTATCA AAGAAACTTC TAA | 191 |
| S. hominis | ATT ATTGGTATCA AAGAAACTTC TAA | 193 |
| S. hominis | ATT ATTGGTATCA AAGAAACTTC TAA | 195 |
| S. lugdunensis | ATT ATTGGTATCc AcGAtACTaC TAA | 197 |
| S. saprophyticus | ATC ATcGGTATgc AAGAAgaaTC CAA | 198 |
| S. saprophyticus | ATC ATcGGTATgc AAGAAgaaTC CAA | 200 |
| S. saprophyticus | ATC ATcGGTATgc AAGAAgaaTC CAA | 199 |
| S. sciuri sciuri | ATC ATcGGTtTaA ctGAAgaaTC TAA | 201 |
| S. warneri | ATC ATcGGTtTac AtGAcACTTC TAA | 187 |
| S. warneri | ATC ATcGGTtTac AtGAcACTTC TAA | 192 |
| S. warneri | ATC ATcGGTtTac AtGAcACTTC TAA | 202 |
| S. warneri | ATC ATcGGTtTac AtGAcACTTC TAA | 203 |
| B. subtilis | ATC ATcGGTcTtc AAGAAgagag AAA | -^{a} |
| E. coli | ATC gTTGGTATCA AAGAgACTCa GAA | 78 |
| L. monocytogenes | GTT ATcGGTATCg AAGAAgaaag aaa | 138^{b} |
| Selected sequence for | ATTGGTATCA AAGAAACTTC | 597 |
| species-specific | | |
| hybridization probe | | |

The sequence numbering refers to the Staphylococcus aureus tuf gene fragment (SEQ ID NO. 179).
Nucleotides in capitals are identical to the selected sequences or match those sequences.
Mismatches are indicated by lowercase letters.
Dots indicate gaps in the sequences displayed.
^{a}This sequence was obtained from Genbank accession #Z99104.
^{b}The SEQ ID NO. refers to previous patent publication WO98/20157.

ANNEX XVII

Strategy for the selection of the Enterococcus-
specific amplification primers from tuf sequences.

| | | |
|---|---|---|
| | SEQ ID | |
| 270 298 556 582 | NO.: | Accession #: |

| | | | |
|---|---|---|---|
| E. avium | TAGAATTAAT GGCTGCTGTT GACGAATAT...TGAA GATATCCAAC GTGGACAAGT ATT | 131^{a} | — |
| E. casseliflavus | TGGAATTAAT GGCTGCAGTT GACGAATAC...TGAA CACATCCAAC GTGGACAAGT ATT | 58 | — |
| E. cecorum | TAGAATTAAT GGCTCCAGTT GACGAATAC...TGAA GATATCCAAC GTGGtCAACT ATT | 59 | — |
| E. dispar | TAGAATTAAT GGCTGCAGTT GACGAATAT...TGAA CATATCCAAC GTGGtCAAGT ATT | 60 | — |
| E. durans | TTGAATTAAT GGCTGCAGTT GACGAATAT...TGAA GACATCCAAC GTGGACAAGT TTT | 61 | — |
| E. flavescens | TGGAATTAAT GGCTGCAGTT GACCAATAC...TGAA GACATCCAAC GTGGACAAGT ATT | 65 | — |
| E. faecium | TTGAATTAAT GGCTGCAGTT GACGAATAC...TGAA GACATCCAAC GTGGACAAGT TTT | 608 | — |
| E. faecalis | TAGAATTAAT GGCTGCAGTT GACGAATAT...TGAA GATATCGAAC GTGGACAAGT ATT | 607 | — |
| E. gallinarum | TGGAATTgAT GGCTGCAGTT GACGAATAC...TGAA GACATCCAAC GTGGACAAGT ATT | 609 | — |
| E. hirae | TTGAATTgAT GGCTGCAGTT GACGAATAT...TGAA GACATCCAAC GTGGACAAGT TTT | 67 | — |
| E. mundtii | TTGAATTgAT GGCTGCAGTT GACGAATAT...TGAA GACATCCAAC CTGGtCAAGT TTT | 68 | — |
| E. pseudoavium | TAGAATTAAT GSCTCCTGTT GACGAATAC...TGAA GACATCCAAC GTGGACAAGT ATT | 69 | — |
| E. raffinosus | TAGAATTAAT GGCTGCTGTT GATGAATAC...TGAA GACATCCAAC GTGGACAAGT ATT | 70 | — |
| E. saccharolyticus | TCGAATTAAT GGCTGCAGTT GACGAATAT...TGAA GACATCCAAC GTGGACAAGT ATT | 71 | — |
| E. solitarius | TGGAcTTAAT GGaTGCAGTT GATGAcTAC...TGAt GATATCGAAC GTCGtCAAGT ATT | 72 | — |
| E. coli | TGGAAcTggc tGgcttccTg GATtctTAY...TGAA GAaATCGAAC GTGGtCAgGT ACT | 78 | — |
| B. cepacia | TGAgccTggc cGacGcgcTg GACaCgTAC...TGAA GACgTgGAgC GTGGcCAgCT TCT | 16 | — |
| B. fragilis | TGGAAcTgAT GGaaGCTGTT GATactTGG...GAAc GAaATCaAAC CTGGtatgGT TCT | — | M22247 |
| B. subtilis | TCGAAcTtAT GGaTGCgGTT GATGAgTAC...TGAA GAaATCCAAC GTGGtCAAGT ACT | — | Z99104 |
| C. diphtheriae | TCGAccTcAT GcagGCTtgc KATGAtTCC...CGAA GACgTtGAgC GTGGcCAgGT TGT | 662 | — |
| C. trachomatis | GAGAgcTAAT GcaaGCcGTc GATGAtAAT...GAAc GATgTgGAAa GaGGAatgGT TGT | 22 | — |
| G. vaginalis | AGGAAcTcAT GaagGCTGTT GACGAgTAC...TACc GACgTtCAgC GTGGtCAgGT TGT | 135^{a} | — |
| S. aureus | TAGAATTAAT GGaaGCTGTa GATactTAC...TGAA GACgTaCAAC GTGGtCAAGT ATT | 179 | — |
| S. pneumoniae | TGGAATTgAT GaacaCAGTT GATGAgTAT...TGAt CAaATCGAAC GTGGACAACT TAT | 145^{a} | — |
| A. adiacens | TAGAATTAAT GGCTCCTGTT GACGAATAC...TGAA aACATCGAAC GTGGACAAGT TCT | 118^{a} | — |
| G. haemolysans | TCGAATTAAT GGaaaCAGTT GACGAATAC...TGAA GACATCGAAC GTGGACAAGT TTT | 87 | — |
| G. morbillorum | TCGAATTAAT GGaaaCAGTT GACGAgTAC...TGAA GATATCGAAC GTGGACAAGT TTT | 88 | — |
| Selected sequence | AATTAAT GGCTGCWGTT GAYGAA | 1137 | |
| for amplification | | | |
| primer | | | |
| Selected sequence | A GAYATCSAAC GTGGACAAGT | 1136 | |
| for amplification | | | |
| primer^{b} | | | |

The sequence numbering refers to the Enterococcus durans tuf gene fragment (SEQ ID NO. 61).
Nucleotides in capitals are identical to the selected or match those sequences.
Mismatches are indicated bv lower-case letters.
Dots indicate gaps in the sepuences displayed.
“Y” “W” and “S” designate nucleotide positions which are degenerated.
“Y” stands for C or T;
“W” stands for A or T;
“S” stands for C or G;
“I” stands for inosine which is a nucleotide analog that can bind to any of the four nucleotides A, c, G or T.
^{a}The SEQ ID NO. refers to previous patent publication WO98/20157.
^{b}This sequence is the reverse-complement of the selected primer.

ANNEX XVIII

Strategy for the selection of the Enterococcus faecalis-specific
hybridization probe, of the Enterococcus faecium-specific hybridization
probe and of the Enterococcus casseliflavus-flavescens-gallinarum
group-specific hybridization probe from tuf sequences.

| | | |
|---|---|---|
| 395 | SEQ ID NO.: | Accession #: |

| | | | |
|---|---|---|---|
| E. avium | GTTGA ACGTGGacAA GTTCGCGTTG GTGACGAAGT TGAAaTcGTa | 131^{A} | — |
| E. casseliflavus | GTTGA ACGTGGacAA GTTCGCGTTG GTGACGAAGT TGAAaTcGTT | 58 | — |
| E. cecorum | GTTGA ACGTGGaCAA GTaCGtGTTG GTGACGAAGT TGAAaTaGTT | 59 | — |
| E. dispar | GTTGA ACGTGGacAA GTTCGCGTTG GTGACGAAGT TGAAaTcGTa | 60 | — |
| E. durans | GTTGA ACGTGGacAA GTTCGCGTTG GTGACGttGT aGAtaTcGTT | 61 | — |
| E. faecalis | GTTGA ACGTGGTGAA GTTCGCGTTG GTGACGAAGT TGAAaTcCTT | 62 | — |
| E. faecium | GTTGA ACGTGGacAA GTTCGCGTTG GTGACGAAGT TGAAGTTGTT | 608 | — |
| E. flavescens | GTTGA ACGTGGacAA GTTCGCGTTG GTGACGAAGT TGAAaTcGTT | 65 | — |
| E. gallinarum | GTTGA ACGTGGacAA GTTCGCGTTG GTGATGAAGT aGAAaTcGTT | 609 | — |
| E. hirae | GTTGA ACGTGGacAA GTTCGCGTTG GTGACGttGT aGAtaTcGTT | 67 | — |
| E. mundtii | GTTGA ACGTGGacAA GTTCGtGTTG GTGACGttaT cGAtaTcGTT | 68 | — |
| E. pseudoavium | GTTGA ACGTGGacAA GTTCGCGTTG GTGACGAAGT TGAAaTcGTa | 69 | — |
| E. raffinosus | GTTGA ACGTGGacAA GTTCGCGTTG GTGACGAAGT TGAAaTcGTa | 70 | — |
| E. saccharolyticus | GTTGA ACGTGGacAA GTTCGCGTTG GTGACGttGT aGAAaTcGTT | 71 | — |
| E. solitarius | GTTGA ACGcGGgact aTcaaaGTCG GCGATGAAGT TGAcaTTaTT | 72 | — |
| C. diphtheriae | GTTGA gCGTGGctcc cTgaagGTCA ACGAGGAcGT cGAgaTcaTc | 662 | — |
| G. vaginalis | GTTGA gCGTGGTaAg cTcCcaATCA ACACCCcAGT TGAgaTcGTT | 135^{a} | — |
| B. cepacia | GTCGA gCGcGGcatc GTgaagGTCG GCGAAGAAaT cGAAaTcGTc | 16 | — |
| S. aureus | GTTGA ACGTGGTcAA aTcaaaGTTG GTGAAGAAGT TGAAaTcaTc | 179 | — |
| B. subtilis | GTAGA ACGaGGacAA GTTaaaGTCG GTGACGAAGT TGAAaTcaTc | — | Z99104 |
| S. pneumoniae | ATCGA cCGTGGTatc GTTaaaGTCA ACGACGAAaT cGAAaTcGTT | 145^{a} | — |
| E. coli | GTAGA ACGcGGTatc aTcaaaGTTG GTGAAGAAGT TGAAaTcGTT | 78 | — |
| B. fragilis | ATCGA AacTGGTGtt aTcCatGTAG GTGATGAAaT cGAAaTccTc | — | M22247 |
| C. trachomatis | ATTGA gCGTGGaatt GTTaaaGTTT CCGATAAAGT TcAgtTgGTc | 22 | — |
| Selected sequences | GA ACGTGGTGAA GTTCGC (E. faecalis) | 1174 | |
| for species-specific | AAGT TGAAGTTGTT | | |
| or group-specific | | | |
| hybridization probes | | | |

| | | |
|---|---|---|
| 448...526 549 | SEQ ID NO.: | Accession #: |

| | | | |
|---|---|---|---|
| E. avium | GGTATcGCT...CATc GGTGCtTTCt TACGTGGTGT | 131^{A} | — |
| E. casseliflavus | GGTATTGCT...CATT GGTGCATTGC TACGTGGTGT | 58 | — |
| E. cecorum | GGTATcCAT...CATc GGTCCATTat TACGTGGTGT | 59 | — |
| E. dispar | GGTATcGCT...CATT GGTGCATTat TACGTGGTGT | 60 | — |
| E. durans | GGTATcCCA...CATT GGTGCtTTaC TACGTCGTGT | 61 | — |
| E. faecalis | GGTATTAAA...CTTc GGTGCtTTat TACGTGGTGT | 62 | — |
| E. faecium | GGTATTGCT...CATT GGTGCtTTaC TACGTGGTGT | 608 | — |
| E. flavescens | GGTATTGCT...CATT GGTGCATTGC TACGTGGGGT | 65 | — |
| E. gallinarum | GGTATTGCT...CATT GGTGCATTGC TACGTGGGGT | 609 | — |
| E. hirae | GGTATcGCA...CATT GGTGCtTTaC TACGTGGTGT | 67 | — |
| E. mundtii | GGTATcGCA...CATT GGTGCgTTaC TACGTGGTGT | 68 | — |
| E. pseudoavium | GGTATCGCT...CATc GGTGCATTat TACGTGGTGT | 69 | — |
| E. raffinosus | GGTATTGCT...CATT GGTGCATTat TACGTGGTGT | 70 | — |
| E. saccharolyticus | GGTATcGAC...CATc GGTGCtTTat TACGTGGGGT | 71 | — |
| E. solitarius | GGTATTGAT...CATT GGTaCtTTGt TACGTGGTGT | 72 | — |
| C. diphtheriae | GGTATcCGC...CTGT GGTctgcTtC TcCGTGGCGT | 662 | — |
| G. vaginalis | GGTtTgCGC...CACT GGTcttcTtC TcCGcCGTAT | 135^{a} | — |
| B. cepacia | GGTATCAAG...CGTT GGTatccTGC TgCGcGGCAC | 16 | — |
| S. aureus | GGTtTaCAT...CATT GGTGCATTat TACGTGGTGT | 179 | — |
| B. subtilis | GGTcTTCAA...CATT GGTGCccTtC TtCGcGGTGT | — | Z99104 |
| S. pneumoniae | GGTATcAAA...CGTa GGTGtccTtC TtCGTGGTGT | 145^{a} | — |
| E. coli | GGTATcAAA...CGTa GGTGttcTGC TgCGTGGTAT | 78 | — |
| B. fragilis | GGTtTgGGT...CGTa GGTctgTTGC TtCGTGGTGT | — | M22247 |
| C. trachomatis | GGTcTTAGA...CGTT GGattgcTcC TcaGaGGTAT | 22 | — |
| Selected sequences | | | |
| for species-specific | | | |
| or group-specific | GGTATT (E. faecium) | 602 | |
| hybridization probes | T GGTGCATTGC TACGTGG | 1122 | |

The sequence numbering refers to the Enterococcus faecium tuf gene fragments (SEQ ID NO. 608).
Nucleotides in capitals are identical to the selected sequences or match those sequences.
Mismatches are indicated by lowercase letters.
Dots indicate gaps in the sequences displayed.
^{a}The SEQ ID NO. refers to previous patent publication WO98/20157.

ANNEX XIX

Strategy for the selection of primers for the
identification of platelets contaminants from tuf sequences.

| | | |
|---|---|---|
| | SEQ ID | Accession |
| 467 495 689 717 | NO.: | #: |

| | | | |
|---|---|---|---|
| B. cereus | GTA ACTGGTGTaG AGATGTTCCG TAAACT...C AGTTCTACTT CCGTACAACT GACGTAAC | 7 | — |
| B. subtilis | GTT ACaGGTGTTG AAATGTTCCG TAAGCT...C AGTTCTACTT CCGTACAACT GACGTAAC | — | Z99104 |
| E. cloacae | TGT ACTGGCGTTG AAATGTTCCG CAAACT...C AGTTCTACTT CCGTACAACT GACGTGAC | 54 | — |
| E. coli | TGT ACTGGCGTTG AAATGTTCCG CAAACT...C AGTTCTACTT CCGTACTACT GACGTGAC | 78 | — |
| K. oxytoca | TGT ACTGGCGTTG AAATGTTCCG CAAACT...C AGTTCTACTT CCGTACAACT GACGTGAC | 100 | — |
| K. pneumoniae | TGT ACTGGCGTTG AAATGTTCCG CAAAGT...C AGTTCTACTT CCGTACTACT GACGTGAC | 103 | — |
| P. aeruginosa | TGG ACcGGCGTTG AAATGTTCCG CAAGCT...C AGTTCTACTT CCGTACCACT GACGTGAC | 153 | — |
| S. agalactiae | GTT ACTGGTGTTG AAATGTTCCG TAAACA...C AATTCTACTT CCGTACAACT GACGTAAC | 209 | — |
| S. aureus | GTT ACaGGTGTTG AAATGTTCCG TAAATT...C AATTCTATTT CCGTACTACT GACGTAAC | 140^{a} | — |
| S. choleraesuis | TGT ACTGGCGTTG AAATGTTCCG CAAACT...C AGTTCTACTT CCGTACTACT GACGTGAC | 159 | — |
| S. epidermidis | GTT ACTGGTGTaG AAATGTTCCG TAAATT...C AATTCTATTT CCGTACTACT GACGTAAC | 611 | — |
| S. marcescens | TGT ACTGGCGTTG AAATGTTCCG CAAACT...C AGTTCTACTT CCGTACCACT GACGTGAC | 168 | — |
| S. mutans | GTT ACTGGTGTTG AAATGTTCCG TAAACT...C AATTCTACTT CCGTACAACT GACGTAAC | 224 | — |
| S. pyogenes | GTT ACTGGTGTTG AAATGTTCCG TAAACA...C AATTCTACTT CCGTACAACT GACGTAAC | — | U40453 |
| S. salivarius | GTT ACTGGTGTTG AAATGTTCCG TAAACA...C AGTTCTACTT CCGTACAACT GACGTAAC | 146^{a} | — |
| S. sanguinis | GTT ACTGGTGTTG AAATGTTCCG TAAACA...C AGTTCTACTT CCGTACAACT GACGTTAC | 227 | — |
| Y. enterocolitica | TGT ACTGGCGTTG AAATGTTCCG CAAACT...C AGTTCTACTT CCGTACAACT GAtGTAAC | 235 | — |
| Selected sequence | ACTGGYGTTG AIATGTTCCG YAA | 636 | |
| for amplification | | | |
| primer | | | |
| Selected sequence | TTCTAYTT CCGTACIACT GACGT | 637 | |
| for amplification | | | |
| primer^{b} | | | |

The sequence numbering refers to the E. coli tuf gene fragment (SEQ ID NO. 78).
Nucleotides in capitals are identical to the selected sequences or match those sequences.
Mismatches are indicated by lower-case letters.
Dots indicate gaps in the sequences displayed.
“R” “Y” “N” “K” “WI” and “S” designate nucleotide positions which are degenerated.
“R” stands for A or G;
“Y” stands for C or T;
“M” stands for A or C;
“K” stands for G or T;
“W” stands for A or T;
“S” stands for C or G.
“I” stands for inosine which is a nucleotide analog that can bind to any of the four nucleotides A, C, G or T.
^{a}The SEQ ID NO. refers to previous patent publication W098/20157.
^{b}This sequence is the reversecomplement of the selected primer.

ANNEX XX
Strategy for the selection of the universal amplification primers from atpD sequences.

| | | |
|---|---|---|
| 616 657 781 | SEQ ID NO. | ACCESSION #: |

| | | | |
|---|---|---|---|
| C. glutamicum | GTGTTCGGTC AGATGGATGA GCCACCAGGA GTCCGTATG CGC...CGTATg | — | X76875 |
| M. tuberculosis | GTATTCGGAC AGATGGACGA GCCGCCGGGC aCCCGTATG CGT...CGGATg | — | Z73419 |
| E. faecalis | GTGTTCGGAC AAATGAACGA ACCACCAGGT GCTCGGATG CGG...CGTATg | 291 | — |
| S. agalactiae | GTCTTTGGTC AAATGAATGA ACCACCAGGA GCACGTATG CGT...CGTATg | 380 | — |
| B. subtilis | GTATTCGGAC AAATGAACGA GCCGCCGGGC GCACGTATG CGT...CGTATg | — | Z28592 |
| L. monocytogenes | GTATTCGGTC AAATGAACGA GCCACCAGGT GCGCGTATG CGT...CGTATg | 324 | — |
| S. aureus | GTATTCGGGC AAATGAATGA GCCACCTGGT GCACGTATG CGT...CGTATg | 366 | — |
| A. baumannii | GTCTACGGTC AGATGAACGA GCCACCAGGT aaCCGTtTa CGC...CGTATg | 243 | — |
| N. gonorrhoeae | GTGTATGGCC AAATGAACGA ACCTCCAGGC aaCCGTcTG CGC...CGTATg | — | Genome project |
| C. freundii | GTATATGGCC AGATGAACGA GCCGCCTGGA aaCCGTcTG CGT...CGTATg | 264 | — |
| E. cloacae | GTTTACGGCC AGATGAACGA GCCACCAGGA aaCCGTcTG CGC...CGTATg | 284 | — |
| E. coli | GTGTATGGCC AGATGAACGA GCCGCCGGGA aaCCGTcTG CGC...CGTATg | 669 | V00267 |
| S. typhimurium | GTGTATGGCC AGATGAACGA GCCGCCGGGA aaCCGTcTG CGC...CGTATg | 351 | — |
| K. pneumoniae | GTGTACGGCC AGATGAACGA GCCGCCGGGA aaCCGTcTG CGC...CGTATg | 317 | — |
| S. marcescens | GTTTACGGCC AGATGAACGA GCCACCAGGT aaCCGTcTG CGC...CGTATg | 357 | — |
| Y. enterocolitica | GTTTATGGCC AAATGAATGA GCCACCAGGT aaCCGTcTG CGC...CGTATg | 393 | — |
| B. cepacia | GTGTACGGCC AGATGAACGA GCCGCCGGGC aaCCGTcTG CGC...CGTATg | — | X76877 |
| H. influenzae | GTTTATGGTC AAATGAACGA GCCACCAGGT aaCCGTtTa CGT...CGTATg | — | U32730 |
| M. pneumoniae | GTGTTTGGTC AGATGAACGA ACCCCCAGGA GCACGGATG CGG...CGGATg | — | U43738 |
| H. pylon | TGCTATGGGC AAATGAATGA GCCACCAGGT GCAAGGAat CGC...CGTATC | 670 | V00267 |
| B. fragilis | GTGTTCGGAC AGATGAACGA ACCTCCTGGA GCACGTgct TCA...CGTATg | — | M22247 |
| Selected sequences | C ARATGRAYCA RCCICCIGGI GYIMGIATG | 562 | |
| for universal | TAYGGIC APATGAAYGA RCCICCIGGI AA | 564 | |
| primers | | | |
| Selected sequences | ATH | 565 | |
| for universal | ATG | 563 | |
| primers^{a} | | | |

| | | |
|---|---|---|
| 812 | SEQ ID NO | ACCESSION # |

| | | | |
|---|---|---|---|
| C. glutamicum | CCTTCCGCCG TGGGTTACCA GCCAAC | — | X76875 |
| M. tuberculosis | CCGTCGGCCG TGGGATACCA GCCCAC | — | Z73419 |
| E. faecalis | CCTTCTGCCG TTGGTTACCA ACCAAC | 291 | — |
| S. agalactiae | CCTTCAGCCG TTGGTTATCA ACCAAC | 380 | — |
| B. subtilis | CCTTCAGCGG TTGGTTATCA GCCGAC | — | Z28592 |
| L. monocytogenes | CCATCTGCGG TAGGTTACCA ACCAAC | 324 | — |
| S. aureus | CCTTCTGCAG TAGGTTACCA ACCAAC | 366 | — |
| A. baumannii | CCATCTGCGG TAGGTTACCA ACCTAC | 243 | — |
| N. gonorrhoeae | CCTTCTGCAG TGGGTTACCA ACCGAC | — | Genome project |
| C. freundii | CCATCAGCGG TAGGCTACCA GCCGAC | 264 | — |
| E. cloacae | CCTTCAGCGG TAGGTTATCA GCCTAC | 284 | — |
| E. coli | CCTTCAGCGG TAGGTTATCA GCCGAC | 669 | V00267 |
| S. typhimurium | CCTTCCGCAG TAGGTTACCA GCCGAC | 351 | — |
| K. pneumoniae | CCTTCAGCGG TAGGTTATCA GCCGAC | 317 | — |
| S. marcescens | CCATCCGCGG TACGTTATCA GCCAAC | 357 | — |
| Y. enterocolitica | CCATCTGCCG TAGGTTACCA GCCAAC | 393 | — |
| B. cepacia | CCGTCGGCAG TGGGCTATCA GCCGAC | — | X76877 |
| H. influenzae | CCATCCGCGG TAGGTTACCA ACCGAC | — | U32730 |
| M. pneumoniae | CCATCAGCCG TGGGTTACCA ACCAAC | — | U43738 |
| H. pylon | CCTTCAGCGG TGGGGTATCA GCCCAC | 670 | V00267 |
| B. fragilis | CCTTCTGCGG TAGGTTATCA ACCTAC | — | M22247 |
| Selected sequences | | | |
| for universal | | | |
| primers | | | |
| Selected sequences | CCITCIGCIG TIGGITAYCA RCC | 565 | |
| for universal | CCITCIGCIG TIGGITAYCA RCC | 563 | |
| primers^{a} | | | |

The sequence numbering refers to the Escherichia coli atpD gene fragment (SEQ ID NO. 669).
Nucleotides in capitals are identical to the selected sequences or match those sequences.
Mismatches for SEQ ID NOs. 562 and 565 are indicated by lowercase letters.
Mismatches for SEQ ID NOs. 564 and 563 are indicated by underlined nucleotides.
Dots indicate gaps in the sequences displayed.
“R” “Y” “M” “K” “W” and “S” letters designate nucleotide positions which are degenerated.
“R” stands for A or G;
“Y” stands for C or T;
“N” stands for A or C;
“K” stands for G or T;
“W” stands for A or T;
“H” stands for A, C or T;
“S” stands for C or G.
“I” stands for inosine which is a nucleotide analog that can bind to any of the four nucleotides A, C, G or T.
^{a}These sequences are the reverse-complement off the selected primers.

ANNEX XXI

Specific and ubiquitous primers for
nucleic acid amplification (recA sequences).

Originating DNA fragment

| | | | Nucleotide |
|---|---|---|---|
| SEQ ID NO. | Nucleotide sequence | SEQ ID NO. | position |
| | Universal primers (recA) | | |
| 919 | 5′-GGI CCI GAR TCI TMI GGI AAR AC | 918^{a} | 437-459 |
| 920^{b} | 5′-TCI CCV ATI TCI CCI TCI AIY TC | 918^{a} | 701-723 |
| 921 | 5′-TIY RTI GAY GCI GAR CAI GC | 918^{a} | 515-534 |
| 922^{b} | 5′-TAR AAY TTI ARI GCI YKI CCI CC | 918^{a} | 872-894 |
| | Sequencing primers (recA) | | |
| 1605 | 5′-ATY ATY GAA RTI TAY GCI CC | 1704^{a} | 220-239 |
| 1606 | 5′-CCR AAC ATI AYI CCI ACT TTT TC | 1704^{a} | 628-650 |
| | Universal primers (rad51) | | |
| 935 | 5′-GGI AAR WSI CAR YTI TGY CAY AC | 939^{a} | 568-590 |
| 936^{b} | 5′-TCI SIY TCI GGI ARR CAl GG | 939^{a} | 1126-1145 |
| | Universal primers (dmc1) | | |
| 937 | 5′-ATI ACI GAR GYI TTY GGI GAR TT | 940^{a} | 1038-1060 |
| 938^{b} | 5′-CYI GTI GYI SWI GCR TGI GC | 940^{a} | 1554-1573 |

^{a}Sequences from databases.
^{b}These sequences are from the complementary DNA strand of the sequence of the originating fragment given in the Sequence Listing.

ANNEX XXII

Specific and ubiquitous primers for
nucleic acid amplification (speA sequences).

Originating DNA fragment

| | | | Nucleotide |
|---|---|---|---|
| SEQ ID NO. | Nucleotide sequence | SEQ ID NO. | position |
| Bacterial species: | Streptococcus pyogenes | | |
| 994 | 5′-TGG ACT AAC AAT CTC GCA AGA GG | 993^{a} | 60-82 |
| 995^{b} | 5′-ACA TTC TCG TGA GTA ACA GGG T | 993^{a} | 173-194 |
| 996 | 5′-ACA AAT CAT GAA GGG AAT CAT TTA G | 993^{a} | 400-424 |
| 997^{b} | 5′-CTA ATT CTT GAG CAG TTA CCA TT | 993^{a} | 504-526 |
| 998 | 5′-GGA GGG GTA ACA AAT CAT GAA GG | 993^{a} | 391-413 |
| 997^{b} | 5′-CTA ATT CTT GAG CAG TTA CCA TT | 993^{a} | 504-526 |

^{a}Sequence from databases.
^{b}These sequences are from the complementary DNA strand of the sequence of the originating fragment given in the Sequence Listing.

ANNEX XXIII

First strategy for the selection of Streptococcus pyogenes-specific
amplification primers from speA sequences.

| | | |
|---|---|---|
| ACCESSION # | 57 85 170 197 | SEQ ID NO.: |

| | | | |
|---|---|---|---|
| speA | X61573 | CCTT GGgCTAACAA cCTCaCAAGA aGTAT...GTGAtCCT.GT cgtTCAtGAG AATGTAAA | — |
| speA | AF029051 | ~~~~ GGgCTAACAA cCTCaCAAGA aCTAT...GTGAtCCT.GT cgtTCAtGAG AATGTAAA | — |
| speA | X61571 | TCTT GGACTAACAA TCTCGCAAGA GGTAT...GTGACCCT.GT TACTCACGAG AATGTGAA | — |
| speA | X61570 | TCTT GGACTAACAA TCTCGCAAGA GGTAT...GTGACCCT.GT TACTCACGAG AATGTGAA | — |
| speA | X61568 | TCTT GGACTAACAA TCTCCCAAGA GGTAT...GTGACCCT.GT TACTCACGAG AATGTGAA | — |
| speA | X61569 | TCTT GGACTAACAA TCTCGCAAGA GGTAT...GTGACCCT.GT TACTCACGAG AATGTGAA | — |
| speA | X61572 | TCTT GGACTAACAA TCTCGCAAGA GGTAT...GTGACCCT.GT TACTCACGAG AATGTGAA | — |
| speA | X61560 | TCTT GGACTAACAA TCTCGCAAGA GGTAT...GTGACCCT.GT TACTCACGAG AATGTGAA | — |
| speA | U40453 | TCTT CGACTAACAA TCTCGCAAGA GGTAT...GTGACCCT.GT TACTCACGAG AATGTGAA | 993 |
| speA | X61554 | TCTT GGACTAACAA TCTCGCAAGA GGTAT...GTGACCCT.GT TACTCACGAG AATGTGAA | — |
| speA | X61557 | TCTT CGACTAACAA TCTCGCAAGA GGTAT...GTGACCCT.GT TACTCAAGAG AATGTGAA | — |
| speA | X61559 | TCTT GGACTAACAA TCTCGCAAGA GGTAT...GTGACCCT.GT TACTCACGAG AATGTGAA | — |
| speA | X61558 | TCTT GGACTAACAA TCTCGCAAGA GGTAT...GTGACCCT.GT TACTCACCAG AATGTGAA | — |
| speA | X61556 | TCTT GGACTAACAA TCTCGCAAGA GGTAT...GTGACCCT.GT TACTCACGAG AATGTGAA | — |
| speA | X61555 | TCTT CGACTAACAA TCTCCCAAGA GGTAT...GTGACCCT.GT TACTCACGAG AATGTGAA | — |
| speA | X61560 | TCTT CGACTAACAA TCTCGCAAGA GGTAT...GTGACCCT.GT TACTCACGAG AATGTGAA | — |
| speA | X61561 | TCTT CGACTAACAA TCTCGCAAGA GGTAT...GTGACCCT.GT TACTCACGAG AATGTGAA | — |
| speA | X62566 | TCTT GGACTAACAA TCTCGCAAGA GGTAT...GTGACCCT.GT TACTCACGAG AATGTGAA | — |
| speA | X61567 | TCTT GGACTAACAA TCTCGCAAGA GGTAT...GTGACCCT.GT TACTCACGAG AATGTGAA | — |
| speA | X61562 | TCTT GGACTAACAA TCTCCCAAGA GGTAT...GTGACCCT.GT TACTCACGAG AATGTGAA | — |
| speA | X61563 | TCTT GGACTAACAA TCTCGCAAGA GGTAT...GTGACCCT.GT TACTCACGAG AATGTGAA | — |
| speA | X61564 | TCTT GGACTAACAA TCTCGCAAGA GGTAT...GTGACCCT.GT TACTCACGAG AATGTGAA | — |
| speA | X61565 | TCTT GGACTAACAA TCTCGCAAGA GGTAT...GTGACCCT.GT TACTCACGAG AATGTGAA | — |
| speA | AF055698 | ~~~~ CCACTAACAA TCTCGCAAGA GGTAT...GTGACCCT.GT TACTCACGAG AATGTGAA | — |
| speA | X039298 | TCTT GGACTAACAA TCTtGCcAaA aGGTA...GTGACCCTGGT TACTCACGAG AATGTGAA | — |

| | | |
|---|---|---|
| Selected sequence | T GGACTAACAA TCTCGCAAGA CC | 994 |
| for species- | | |
| specific primer | | |
| Selected sequence | ACCCT.GT TACTCACGAC AATGT | 995 |
| for species- | | |
| specific primer^{b} | | |

The sequence iiumbering refers to the Streptococcus pyogenes speA gene fragment (SEQ ID NO. 993).
Nucleotides in capitals are identical to the selected sequences or match those sequences.
Mismatches are indicated by lowercase letters.
“~” indicate incomplete sequence data.
Dots indicate gap in the sequences displayed.
^{a}The extra G nucleotide introducing a gap in the sequence is probably a sequencing error.
^{b}This sequence is the reverse-complement of the selected primer.

ANNEX XXIV

Second strategy for the selection of Streptococcus pyogenes-specific
amplification primers from speA sequences.

| | | | SEQ ID |
|---|---|---|---|
| | Accession # | 388 427 501 529 | NO.: |
| speA | X61573 | TA TCGAGGGGTA ACAAATCATG AAGGGAATCA TTTAGAAA...AAAAATGGT AACTGCTCAA GAATTAGACT | — |
| speA | AF029051 | TA TGGAGGGGTA ACAAATCATG AAGGGAATCA TTTAGAAA...AAAAATGGT AACTGCTCAA GAATTAGACT | — |
| speA | X61571 | TA CGGAGGGGTA ACAAATCATG AAGGGAATCA TTTAGAAA...AAAAATGGT AACTGCTCAA GAATTAGACT | — |
| speA | X61570 | TA CGGAGGGGTA ACAAATCATG AAGGGAATCA TTTAGAAA...AAAAATGGT AACTGCTCAA GAATTAGACT | — |
| speA | X61568 | TA CGGAGGGGTA ACAAATCATG AAGGGAATCA TTTAGAAA...AAAAATGGT AACTGCTCAA GAATTAGACT | — |
| speA | X61569 | TA CGGAGGGGTA ACAAATCATG AAGGGAATCA TTTAGAAA...AAAAATGGT AACTGCTCAA GAATTAGACT | — |
| speA | X61572 | TA CGGAGGGGTA ACAAATCATG AAGGGAATCA TTTAGAAA...AAAAATGGT AACTGCTCAA GAATTAGACT | — |
| speA | X61560 | TA CGGAGGGGTA ACAAATCATG AAGGGAATCA TTTAGAAA...AAAAATGGT AACTGCTCAA GAATTAGACT | — |
| speA | U40453 | TA CGGAGGGGTA ACAAATCATG AAGGGAATCA TTTAGAAA...AAAAATGGT AACTGCTCAA GAATTAGACT | 993 |
| speA | X61554 | TA CGGAGGGGTA ACAAATCATG AAGGGAATCA TTTAGAAA...AAAAATGGT AACTGCTCAA GAATTAGACT | — |
| speA | X61557 | TA CGGAGGGGTA ACAAATCATG AAGGGAATCA TTTAGAAA...AAAAATGGT AACTGCTCAA GAATTAGACT | — |
| speA | X61559 | TA CGGAGGGGTA ACAAATCATG AAGGGAATCA TTTACAAA...AAAAATGGT AACTGCTCAA GAATTAGACT | — |
| speA | X61558 | TA CGGAGGGGTA ACAAATCATG AAGGGAATCA TTTAGAAA...AAAAATGGT AACTGCTCAA GAATTAGACT | — |
| speA | X61556 | TA CGGAGGGGTA ACAAATCATG AAGGGAATCA TTTAGAAA...AAAAATGGT AACTCCTCAA GAATTAGACT | — |
| speA | X61555 | TA CGGAGGGGTA ACAAATCATG AAGGGAATCA TTTAGAAA...AAAAATGGT AACTGCTCAA GAATTAGACT | — |
| speA | X61560 | TA CGGAGGGGTA ACAAATCATG AAGGGAATCA TTTAGAAA...AAAAATGGT AACTGCTCAA GAATTAGACT | — |
| speA | X61561 | TA CGGAGGGGTA ACAAATCATG AAGGGAATCA TTTAGAAA...AAAAATGGT AACTGCTCAA GAATTAGACT | — |
| speA | X61566 | TA CGGAGGGGTA ACAAATCATG AAGGGAATCA TTTAGAAA...AAAAATGGT AACTGCTCAA GAATTAGACT | — |
| speA | X61567 | TA CGGAGGGGTA ACAAATCATG AAGGGAATCA TTTAGAAA...AAAAATGGT AACTGCTCAA GAATTAGACT | — |
| speA | X61562 | TA CGGAGCGGTA ACAAATCATG AAGGGAATCA TTTAGAAA...AAAAATCGT AACTGCTCAA GAATTAGACT | — |
| speA | X61563 | TA CGGAGGGGTA ACAAATCATG AAGGGAATCA TTTAGAAA...AAAAATGGT AACTGCTCAA GAATTAGACT | — |
| speA | X61564 | TA CGGAGGGGTA ACAAATCATG AAGGGAATCA TTTAGAAA...AAAAATGGT AACTGCTCAA GAATTAGACT | — |
| speA | X61565 | TA CGGAGGGGTA ACAAATCATG AAGGGAATCA TTTAGAAA...AAAAATGGT AACTGCTCAA GAATTAGACT | — |
| speA | AF055698 | TA CGGAGGGGTA ACAAATCATG AAGGGAATCA TTTAGAAA...AAAAATGGT AACTGCTCAA GAATTAGACT | — |
| speA | X03929 | TA CGGAGGGGTA ACAAATCATG AAGGGAATCA TTTAGAAA...AAAAATGGT AACTGCTCAA GAATTAG.CT | — |

| | | |
|---|---|---|
| Selected | GGAGGGGTA ACAAATCATG AAGG | 998 |
| sequences for | ACAAATCATG AAGGGAATCA TTTAG | 996 |
| species-specific | | |
| primers | | |
| Selected | AATGGT AACTGCTCAA GAATTAG | 997 |
| sequence for | | |
| species-specific | | |
| primers^{a} | | |

The sequence numbering refers to the Streptococcus pyogenes speA gene fragment (SEQ ID NO. 993).
Dots indicate gaps in the sequences displayed.
^{a}This sequence is the reverse-complement of the selected primer.

ANNEX XXV

Strategy for the selection of Streptococcus pyogenes-specific
amplification primers from tuf sequences.

| | |
|---|---|
| 140 186 619 | SEQ ID NO.: |

| | | |
|---|---|---|
| S. anginosus | A AGTTGACtTg GTTGACGAtG AAGAaTTGCT TGAATTgGTT GAaATG...CC AgGTTCAATt | 211 |
| S. bovis | A AGTTGACCTT GTTGATGACG AAGAaTTGCT TGAATTgGTT GAaATG...CC AgGTTCAATC | 212 |
| S. dysgalactiae | A AATTGACCTT GTTGAcGAtG AAGAaTTGCT TGAATTgGTT GAaATG...CC AgGTTCAATC | 217 |
| S. pyogenes | A AGTTGACCTT GTTGATGACG AAGAGTTGCT TGAATTAGTT GAGATG...CC AAGTTCAATC | 1002 |
| S. agalactiae | A AGTTGACCTT GTTGATGAtG AAGAaTTGCT TGAATTgGTT GAaATG...CC AgGTTCAATC | 144^{a} |
| S. oralis | A AATTGACtTg GTAGAcGACG AAGAaTTGCT TGAATTgGTT GAaATG...CC AgGTTCAATC | 985 |
| S. pneumoniae | A AGTTGACtTg GTTGAcGACG AAGAaTTGCT TGAATTgGTT GAaATG...CC AgGTTCAATC | 145^{a} |
| S. cristatus | A GATCGACtTg GTTGATGACG AAGAaTTGCT TGAATTgGTT GAaATG...CC AgGTTCAATC | 215 |
| S. mitis | A GATCGACtTg GTTGATGACG AAGAaTTGCT TGAATTgGTT GAaATG...CC AgGTTCAATC | 982 |
| S. gordonii | A AGTTGACtTg GTTGAcGAtG AAGAaTTGCT TGAGTTgGTT GAaATG...CC AgGTTCAATC | 200 |
| S. sanguinis | A AGTTGACtTg GTTGAcGAtG AAGAaTTGCT TGAATTgGTT GAaATG...CC AgGTTCAATC | 227 |
| S. parasanguinis | A AGTTGACtTg GTTGATGAtG AAGAaTTGCT TGAATTgGTT GAaATG...CC AgGTTCAATC | 225 |
| S. salivarius | A AGTTGACtTg GTTGAcGAtG AAGAaTTGCT TGAATTgGTT GAaATG...CC TgGTTCAATC | 146^{a} |
| S. vestibularis | A AGTTGACtTg GTTGAcGAtG AAGAaTTGCT TGAATTgGTT GAaATG...CC TgGTTCAATC | 231 |
| S. suis | A AGTTGACtTg GTTGAcGAtG AAGAaTTGCT TGAgTTgGTT GAaATG...CC AgGTTCtATC | 229 |
| S. mutans | A AGTTGAttTg GTTGAcGAtG AAGAaTTGCT TGAATTgGTT GAaATG...CC AgGTTCAATt | 224 |
| S. ratti | A GGTTGACtTg GTTGATGAtG AAGAaTTGCT TGAATTgGTT GAaATG...CC AgGTTCAATt | 226 |
| S. macacae | A AGTTGACtTa GTTGATGAtG AAGAaTTGCT TGAATTgGTT GAaATG...CC AgGATCAATt | 222 |
| S. cricetus | A GGTTGACtTg GTTGAcGAtG AAGAaTTGCT TGAATTgGTT GAaATG...CC TgGTTCAATC | 214 |
| E. faecalis | A AATgGAtaTg GTTGATGACG AAGAaTTatT aGAATTAGTa GAaATG...CC AgcTaCAATC | 607 |
| S. aureus | A AGTTGACaTg GTTGAcGAtG AAGAaTTatT aGAATTAGTa GAaATG...CC TgGTTCAATt | 176 |
| B. cereus | A ATgcGACaTg GTaGATGACG AAGAaTTatT aGAATTAGTa GAaATG...AG CgGTTCtgTa | 7 |
| E. coli | A ATgcGACaTg GTTGATGACG AAGAGcTGCT gGAAcTgGTT GAaATG...CC GgGCaCcATC | 78 |
| Selected | TTGACCTT GTTGkTGACG AAGAG | 999 |
| sequences for | AAGAGTTGCT TGAATTAGTT GAG | 1001 |
| species-specific | | |
| primers | | |
| Selected | AGTTCAATC | 1000 |
| sequence for | | |
| species-specific | | |
| primer^{b} | | |

| | |
|---|---|
| 647 | SEQ ID NO.: |

| | | |
|---|---|---|
| S. anginosus | cAtCCACACA CTAAATT | 211 |
| S. bovis | CACCCACACA CTAAATT | 212 |
| S. dysgalactiae | AACCCACACA CTAAATT | 217 |
| S. pyogenes | AACCCACACA CTAAATT | 1002 |
| S. agalactiae | AACCCACACA CTAAATT | 144^{a} |
| S. oralis | AACCCACACA CTAAATT | 985 |
| S. pneumoniae | AACCCACACA CTAAATT | 145^{a} |
| S. cristatus | AACCCACACA CTAAATT | 215 |
| S. mitis | AACCCACACA CTAAATT | 982 |
| S. gordonii | AACCCACACA CTAAATT | 200 |
| S. sanguinis | AACCCACACA CTAAATT | 227 |
| S. parasanguinis | AACCCACACA CTAAATT | 225 |
| S. salivarius | AACCCACACA CTAAATT | 146^{a} |
| S. vestibularis | AACCCACACA CTAAATT | 231 |
| S. suis | AACCCACACA CTAAATT | 229 |
| S. mutans | cACCCACAcA CTAAATT | 224 |
| S. ratti | CAtCCgCAcA CTAAATT | 226 |
| S. macacae | cAtCCACAcA CTAAATT | 222 |
| S. cricetus | cAtCCACACA CTAAATT | 214 |
| E. faecalis | ActCCACACA CaAAATT | 607 |
| S. aureus | AcaCCACACA CTgAATT | 176 |
| B. cereus | AAagCtCACg CTAAATT | 7 |
| E. coli | AAgCCgCACA CcAAGTT | 78 |
| Selected | | |
| sequences for | | |
| species-specific | | |
| primers | | |
| Selected | AACCCACACA CTAA | 1000 |
| sequence for | | |
| species-specific | | |
| primer^{b} | | |

The sequence numbering refers to the Streptococcus pyogenes tuf gene fragment (SEQ ID NO. 1002).
Nucleotides in capitals are identical to the selected sequences or match those sequences.
Mismatches are indicated by lowercase letters.
Dots indicate gaps in the sequences displayed.
^{a}The SEG ID NO. refers to previous patent publication WO98/20157.
^{b}This sequence is the reverse-complement of the selected primer.

ANNEX XXVI
Strategy for the selection stx₁-specific amplification primers and hybridization probe.

| | | |
|---|---|---|
| Accession # | 230 263 343 | SEQ ID NO.: |

| | | | |
|---|---|---|---|
| stx₁ | M19473a | TTGATGTC AGAGGGATAG ATCCAGAGGA AGGGCG...TATCG CTTTGCTGAT TTTTCACATG | — |
| stx₁ | M16625 | TTGATGTC AGAGGGATAG ATCCAGAGGA AGGGCG...TATCG CTTTGCTGAT TTTTCACATG | — |
| stx₁ | D417358 | TTGATGTC AGAGGGATAG ATCCAGAGGA AGGGCG...TATCG CTTTGCTGAT TTTTCACATG | — |
| stx₁ | Z36900 | TTGATGTC AGAGGGATAG ATCCAGAGGA AGGGCG...TATCG CTTTGCTGAT TTTTCACATG | — |
| stx₁ | L04539 | TTGATGTC AGAGGGATAG ATCCAGAGGA AGGGCG...TATCG CTTTGCTGAT TTTTCACATG | — |
| stx₁ | M19437 | TTGATGTC AGAGGGATAG ATCCAGAGGA AGGGCG...TATCG CTTTGCTGAT TTTTCACATG | — |
| stx₁ | M24352 | TTGATGTC AGAGGGATAG ATCCAGAGGA AGGGCG...TATCG CTTTGCTGAT TTTTCACATG | — |
| stx₁ | X07903 | TTGATGTC AGAGGGATAG ATCCAGAGGA AGGGCG...TATCG CTTTGCTGAT TTTTCACATG | — |
| stx₁ | Z36899 | TTGATGTC AGAGGGATAG ATCCAGAGGA AGGGCG...TATCG CTTTGCTGAT TTTTCACATG | — |
| stx₁ | Z36901 | TTGATGTC AGAGGGATAG ATCCAGAGGA AGGGCG...TATCG CTTTGCTGAT TTTTCACATG | 1076 |
| stx₂ | X61283 | TGGATaTa cGAGGGcTtG ATgtctAtcA gGcGCG...TACCG tTTTtCaGAT TTTaCACATa | — |
| stx₂ | L11079 | TGGATaTa cGAGGGcTtG ATgtctAtcA gGcGCG...TACCG tTTTtCaGAT TTTaCACATa | — |
| stx₂ | M21534 | TAGgTaTa cGAGGGcTtG ATgtttAtcA gGaGCG...TACaG aTTTtCaGAT TTTgCACATa | — |
| stx₂ | M36727 | TAGgTaTa cGAGGGcTtG ATgtttAtcA gGaGCG...TACaG aTTTtCaGAT TTTgCACATa | — |
| stx₂ | X81415 | TAGgTaTa cGAGGGcTtG ATgtttAtcA gGaGCG...TACaG aTTTtCaGAT TTTgCACATa | — |
| stx₂ | X81416 | TAGgTaTa cGAGGGcTtG ATgtttAtcA gGaGCG...TACaG aTTTtCaGAT TTTgCACATa | — |
| stx₂ | X81417 | TAGgTaTa cGAGGGcTtG ATgtttAtcA gGaGCG...TACaG aTTTtCaGAT TTTgCACATa | — |
| stx₂ | X81418 | TAGgTaTa cGAGGGcTtG ATgtttAtcA gGaGCG...TACaG aTTTtCaGAT TTTgCACATa | — |
| stx₂ | E03962 | TGGATaTa cGAGGGcTtG ATgtctAtcA gGcGCG...TACCG tTTTtCaGAT TTTaCACATa | — |
| stx₂ | E03959 | TGGATaTa cGAGGGcTtG ATgtctAtcA gGcGCG...TACCG tTTTtCaGAT TTTaCACATa | — |
| stx₂ | X07865 | TGGATaTa cGAGGGcTtG ATgtctAtcA gGcGCG...TACCG tTTTtCaGAT TTTaCACATa | — |
| stx₂ | Y10775 | TGGATaTa cGAGGGcTtG ATgtctAtcA gGcGCG...TACCG tTTTtCaGAT TTTaCACATa | — |
| stx₂ | Z37725 | TGGATaTa cGAGGGcTtG ATgtctAtcA gGcGCG...TACCG tTTTtCaGAT TTTaCACATa | 1077 |
| stx₂ | Z50754 | TGGATaTa cGAGGGcTtG ATgtctAtcA gGcGCG...TACCG tTTTtCaGAT TTTaCAcATa | — |
| stx₂ | X67514 | TGGATaTa cGAGGGcTtG ATgtctAtcA gGcGCG...TACCG tTTTtCaGAT TTTaCACATa | — |
| stx₂ | L11078 | TGGATaTa cGAGGGcTtG ATgtctAtcA gGcGCG...TACCG tTTTtCaGAT TTTaCACATa | — |
| stx₂ | X65949 | TGGATaTa cGAGGGcTtG ATgtctAtcA gGcGCG...TACCG tTTTtCaGAT TTTaCACATa | — |
| stx₂ | AF043627 | TGGATaTa cGAGGGcTtG ATgtctAtcA gGcGCG...TACaG aTTTtCaGAT TTTgCACATa | — |

| | | |
|---|---|---|
| Selected sequence | ATGTC AGAGGGATAG ATCCAGAGGA AGG | 1081 |
| for amplification | | |
| primer | | |
| Selected sequence | CG CTTTGCTGAT TTTTCACATG | 1084 |
| for hybridization | | |
| probe | | |
| Selected sequence | | |
| for amplification | | |
| primer^{a} | | |

| | | |
|---|---|---|
| Accession # | 375 391 421 | SEQ ID NO.: |

| | | | |
|---|---|---|---|
| stx₁ | M19473a | TTACCTTT...GTTACAT TGTCTGGTGA CAGTAGCTAT ACCA | — |
| stx₁ | M16625 | TTACCTTT...GTTACAT TGTCTGGTGA CAGTAGCTAT ACCA | — |
| stx₁ | D417358 | TTACCTTT...GTTACAT TGTCTGGTGA CAGTAGCTAT ACCA | — |
| stx₁ | Z36900 | TTACCTTT...GTTACAT TGTCTaGTGA CAGTAGCTAT ACCA | — |
| stx₁ | L04539 | TTACCTTT...GTTACAT TGTCTGGTGA CAGTAGCTAT ACCA | — |
| stx₁ | M19437 | TTACCTTT...GTTACAT TGTCTGGTGA CAGTAGCTAT ACCA | — |
| stx₁ | M24352 | TTACCTTT...GTTACAT TGTCTGGTGA CAGTAGCTAT ACCA | — |
| stx₁ | X07903 | TTACCTTT...GTTACAT TGTCTGGTGA CAGTAGCTAT ACCA | — |
| stx₁ | Z36899 | TTACCTTT...GTTACAT TGTCTGGTGA CAGTAGCTAT ACCA | — |
| stx₁ | Z36901 | TTACCTTT...GTTACAT TGTCTGGTGA CAGTAGCTAT ACCA | 1076 |
| stx₂ | X61283 | TatCaGTG...GTTtCca TGaCaacgGA CAGcAGtTAT ACCA | — |
| stx₂ | L11079 | TatCaGTG...GTTtCca TGaCaacgGA CAGcAGtTAT ACCA | — |
| stx₂ | M21534 | TatCaTTG...ATTtCca TGaCaacgGA CAGcAGtTAT ACCA | — |
| stx₂ | M36727 | TatCaTTG...ATTtCca TGaCaacgGA CAGcAGtTAT ACCA | — |
| stx₂ | X81415 | TatCaTTG...ATTtCca TGaCaacgGA CAGcAGtTAT ACCA | — |
| stx₂ | X81416 | TatCaTTG...ATTtCca TGaCaaagGA CAGcAGtTAT ACCA | — |
| stx₂ | X81417 | TatCaTTG...ATTtCca TGaCaacgGA CAGcAGtTAT ACCA | — |
| stx₂ | X81418 | TatCaTTG...ATTtCca TGaCaacgGA CAGcAGtTAT ACCA | — |
| stx₂ | E03962 | TatCaGTG...GTTtCCa TGaCaacgGA CAGcAGtTAT ACCA | — |
| stx₂ | E03959 | TatCaGTG...GTTtCca TGaCaacgGA CAGcAGtTAT ACCA | — |
| stx₂ | X07865 | TatCaGTG...GTTtCca TGaCaacgGA CAGcAGtTAT ACCA | — |
| stx₂ | Y10775 | TatCaGTG...GTTtCca TGaCaacgGA CAGCAGtTAT ACCA | — |
| stx₂ | Z37725 | TatCaGTG...GTTtCca TGaCaacgGA CAGCAGtTAT ACCA | 1077 |
| stx₂ | Z50754 | TatCaGTG...GTTtCca TGaCaacgGA CAGcAGtTAT ACCA | — |
| stx₂ | X67514 | TatCaGTG...GTTtCca TGaCaacgGA CAGcAGtTAT ACCA | — |
| stx₂ | L11078 | TatCaGTG...GTTtCca TGaCaacgGA CAGcAGtTAT ACCA | — |
| stx₂ | X65949 | TatCaGTG...GTTtCca TGaCaacgGA CAGcAGtTAT ACCA | — |
| stx₂ | AF043627 | TatCaGTG...GTTtCca TGaCaacgGA CAGcAGtTAT ACCA | — |

| | | |
|---|---|---|
| Selected sequence | | |
| for amplification | | |
| primer | | |
| Selected sequence | TTACC | 1084 |
| for hybridization | | |
| probe | | |
| Selected sequence | ACAT TGTCTGGTGA CAGTAGCTAT A | 1080 |
| for amplification | | |
| primer^{a} | | |

The sequence numbering refers to the Escherichia coil stx₁ gene fragment (SEQ ID NO. 1076).
Nucleotides in capitals are identical to the selected sequences or match those sequences.
Mismatches are indicated by lowercase letters.
Dots indicate gaps in the sequences displayed.
^{a}This sequence is the reverse-complement of the selected primer.

ANNEX XXVII

Strategy for the selection of stx₂-specific
amplification primers and hybridization probe.

| | | |
|---|---|---|
| Accession # | 543 570 614 641 | SEQ ID NO. |

| | | | |
|---|---|---|---|
| stx₁ | M19473 | AGCga TgtTaCGgTT TGTtACTGTG ACA...CAAC ACTGgaTGAt ctcAgTGggC gTtcTTA...A | — |
| stx₁ | M16625 | AGCga TgtTaCGgTT TGTtACTGTG ACA...CAAC ACTGgaTGAt ctcAgTcggC gTtcTTA...A | — |
| stx₁ | M17358 | AGCga TgtTaCGgTT TCTtACTGTG ACA...CAAC ACTGgaTGAt ctcAgTGggc gTtcTTA...A | — |
| stx₁ | Z36900 | AGCga TgtTaCGgTT TGTtACTGTG ACA...CAAC ACTGgaTGAt ctcAgTGggC gTtcTTA...A | — |
| stx₁ | L04539 | AGCga TgtTaCGgTT TGTtACTGTG ACA...CAAC ACTGgaTGAt ctcAgTGggC gTtcTTA...A | — |
| stx₁ | M19437 | AGCga TgtTaCGgTT TGTtACTGTG ACA...CAAC ACTCgaTGAt ctcAgTGggC gTtcTTA...A | — |
| stx₁ | M24352 | AGCga TgtTaCGgTT TGTtACTGTG ACA...CAAC ACTGgaTGAt ctcAgTGggC gTtcTTA...A | — |
| stx₁ | XC7903 | AGCga TgtTaCGgTT TCTtACTGTG ACA...CAAC ACTGgaTGAt ctcAgTCggC gTtcTTA...A | — |
| stx₁ | Z36899 | AGCga TgtTaCGgTT TGTtACTGTG ACA...CAAC ACTGgaTGAt ctcAgTGggC gTtcTTA...A | — |
| stx₁ | Z36901 | AGCga TgtTaCGgTT TGTtACTGTG ACA...CAAC ACTtgaTGAt ctcAgTGggC gTtcTTA...A | 1076 |
| stx₂ | X61283 | AGCAC TTCTGCGTTT TGTCACTGTC ACA...AGGC ACTGTCTGA. ..AACTGCTC CTGTGTA...G | — |
| stx₂ | L11079 | AGCAG TTCTGCGTTT TGTCACTGTC ACA...AGGC ACTGTCTGA. ..AACTGCTC CTGTGTA...G | — |
| stx₂ | M21534 | AGGAG TTCTGCGTTT TGTCACTGTC ACA...TGGC ACTGTCTGA. ..AACTGCTC CTGTTTA...G | — |
| stx₂ | M36727 | AGGAG TTCTGCGTTT TGTCACTGTC ACA...TGGC ACTGTCTGA. ..AACTGCTC CTGTTTA...G | — |
| stx₂ | U72191 | AGCAG TTCTGCGTTT TGTCACTGTC ACA...TGGC ACTGTCTGA. ..AACTGCTC CTGTTTA...G | — |
| stx₂ | X81415 | AGCAG TTCTGCGTTT TGTCACTGTC ACA...TGGC ACTGTCTGA. ..AACTGCTC CTGTTTA...G | — |
| stx₂ | X81416 | AGCAG TTCTGCGTTT TGTCACTGTC ACA...TGGC ACTGTCTGA. ..AACTGCTC CTGTTTA...G | — |
| stx₂ | X81417 | AGCAG TTCTGCGTTT TGTCACTGTC ACA...TGGC ACTGTCTGA. ..AACTGCTC CTGTTTA...G | — |
| stx₂ | X81418 | AGCAG TTCTGCGTTT TGTCACTGTC ACA...TGGC ACTGTCTGA. ..AACTGCTC CTGTTTA...G | — |
| stx₂ | E03962 | AGCAG TTCTGCGTTT TGTCACTGTC ACA...AGGC ACTGTCTGA. ..AACTGCTC CTGTGTA...G | — |
| stx₂ | E03959 | AGCAG TTCTGCGTTT TGTCACTGTC ACA...AGGC ACTGTCTGA. ..AACTGCTC CTGTGTA...G | — |
| stx₂ | X07865 | AGCAG TTCTGCGTTT TGTCACTGTC ACA...AGGC ACTGTCTGA. ..AACTGCTC CTGTGTA...G | — |
| stx₂ | Y10775 | AGCAG TTCTGCGTTT TGTCACTGTC ACA...AGGC ACTGTCTGA. ..AACTGCTC CTGTGTA...G | — |
| stx₂ | Z37725 | AGCAG TTCTGCGTTT TGTCACTGTC ACA...AGGC ACTGTCTGA. ..AACTGCTC CTGTGTA...G | 1077 |
| stx₂ | Z50754 | AGCAG TTCTGCGTTT TGTCACTGTC ACA...AGGC ACTGTCTGA. ..AACTGCTC CTGTGTA...G | — |
| stx₂ | X67514 | AGCAG TTCTGCGTTT TGTCACTGTC ACA...AGGC ACTGTCTGA. ..AACTGCTC CTGTGTA...G | — |
| stx₂ | L11078 | AGCAG TTCTGCGTTT TGTCACTGTC ACA...AGGC ACTGTCTGA. ..AACTGCTC CTGTGTA...G | — |
| stx₂ | X65949 | AGCAG TTCTGCGTTT TGTCACTGTC ACA...AGGC ACTGTCTGA. ..AACTGCTC CTGTGTA...G | — |
| stx₂ | AF043627 | AGCAG TTCTGCGTTT TGTCACTGTC ACA...TGGC ACTGTCTGA. ..AACTGCTC CTGTTTA...G | — |

| | | |
|---|---|---|
| Selected sequence | AG TTCTGCGTTT TGTCACTGTC | 1078 |
| for amplification | | |
| primer | | |
| Selected sequence | C ACTGTCTGA. ..AACTGCTC CTGT | 1085 |
| for hybridization | | |
| probe | | |
| Selected sequence | | |
| for amplification | | |
| primer^{a} | | |

| | | |
|---|---|---|
| Accession # | 684 708 | SEQ ID NO.: |

| | | | |
|---|---|---|---|
| stx₁ | M19473 | AGgtTgAGtA gCGTcCTgCC tGAC | — |
| stx₁ | M16625 | AGgtTgAGtA gCCTcCTgCC tGAC | — |
| stx₁ | M17358 | AGgtTgACtA gCGTcCTgCC tGAC | — |
| stx₁ | Z36900 | AGgtTgAGtA gTGTcCTgCC tGAT | — |
| stx₁ | L04539 | AGgtTgAGtA gTGTcCTgCC tGAT | — |
| stx₁ | M19437 | AGgtTgAGtA gTGTcCTgCC tGAC | — |
| stx₁ | M24352 | AGgtTgAGtA gTGTcCTgCC tGAC | — |
| stx₁ | XC7903 | AGgtTgAGtA gTGTcCTgCC tGAC | — |
| stx₁ | Z36899 | AGgtTgAGtA gTGTcCTgCC tGAC | — |
| stx₁ | Z36901 | AGgtTgAGtA gTGTcCTgCC tGAC | 1076 |
| stx₂ | X61283 | CGAATCAGCA ATGTGCTTCC GGAG | — |
| stx₂ | L11079 | CGAATCAGCA ATGTGCTTCC GGAG | — |
| stx₂ | M21534 | AGAATCAGCA ATGTGCTTCC GGAG | — |
| stx₂ | M36727 | AGAATCAGCA ATGTGCTTCC GGAG | — |
| stx₂ | U72191 | AGAATCAGCA ATGTGCTTCC GGAG | — |
| stx₂ | X81415 | AGAATCAGCA ATGTGCTTCC GGAG | — |
| stx₂ | X81416 | AGAATCAGCA ATGTGCTTCC GGAG | — |
| stx₂ | X81417 | AGAATCAGCA ATGTGCTTCC GGAG | — |
| stx₂ | X81418 | AGAATCAGCA ATGTGCTTCC GGAG | — |
| stx₂ | E03962 | CGAATCAGCA ATGTGCTTCC GGAG | — |
| stx₂ | E03959 | CGAATCAGCA ATGTGCTTCC GGAG | — |
| stx₂ | X07865 | CGAATCAGCA ATGTGCTTCC GGAG | — |
| stx₂ | Y10775 | CGAATCAGCA ATGTGCTTCC GGAG | — |
| stx₂ | Z37725 | CGAATCAGCA ATGTGCTTCC GGAG | 1077 |
| stx₂ | Z50754 | CGAATCAGCA ATGTGCTTCC GGAG | — |
| stx₂ | X67514 | CGAATCAGCA ATGTGCTTCC GGAG | — |
| stx₂ | L11078 | AGAATCAGCA ATGTGCTTCC GGAG | — |
| stx₂ | X65949 | AGAATCAGCA ATGTGCTTCC GGAG | — |
| stx₂ | AF043627 | AGAATCAGCA ATGTGCTTCC GGAG | — |

| | | |
|---|---|---|
| Selected sequence | | |
| for amplification | | |
| primer | | |
| Selected sequence | | |
| for hybridization | | |
| probe | | |
| Selected sequence | AATCAGCA ATGTGCTTCC G | 1079 |
| for amplification | | |
| primer^{a} | | |

The sequence numbering refers to the Escherichia coli stx₂ gene fragment (SEQ ID NO. 1077).
Nucleotides in capitals are identical to the selected sequences or match those sequences.
Mismatchs are indicated by lowercase letters.
Dots indicate gaps in the sequences displayed.
^{a}This sequence is the reverse-complement of the selected primer.

ANNEX XXVIII

Strategy for the selection of vanA-specific
amplification primers from van sequences.

| | | |
|---|---|---|
| Accession # | 926 952 1230 1255 | SEQ ID NO.: |

| | | | |
|---|---|---|---|
| vanA | X56895 | GTCAAT AGCGCGGACG AATTGGACTA C...GT AGAGGTCTAG CCCGTGTGGA TATG | 1139 |
| vanA | M97297 | GTCAAT AGCGCGGACG AATTGGACTA C...GT AGAGGTCTAG CCCGTGTGGA TATG | 1141 |
| vanA | — | GTCAAT AGCGCGGACG AATTGGACTA C...GT AGAGGTCTAG CCCGTGTGGA TATG | 1051 |
| vanA | — | GTCAAT AGCGCGGACG AATTGGACTA C...GT AGAGGTCTAG CCCGTGTGGA TATG | 1052 |
| vanA | — | GTCAAT AGCGCGGACG AATTGGACTA C...GT AGAGGTCTAG CCCGTGTGGA TATG | 1053 |
| vanA | — | GTCAAT AGCGCGGACG AATTGGACTA C...GT AGAGGTCTAG CCCGTGTGGA TATG | 1054 |
| vanA | — | GTCAAT AGCGCGGACG AATTGGACTA C...GT AGAGGTCTAG CCCGTGTGGA TATG | 1055 |
| vanA | — | GTCAAT AGCGCGGACG AATTGGACTA C...GT AGAGGTCTAG CCCGTGTGGA TATG | 1056 |
| vanA | — | GTCAAT AGCGCGGACG AATTGGACTA C...GT AGACGTCTAG CCCGTGTGGA TATG | 1057 |
| vanA | — | GTCAAT AGCGCGGACG AATTGGACTA C...GT AGACGTCTAG CCCGTGTGGA TATG | 1049 |
| vanA | — | GTCAAT AGCGCGGACG AATTGGACTA C...GT AGACGTCTAG CCCGTGTGGA TATG | 1050 |
| vanB | U94526 | GTAAAc gGtaCGGAaG AAcTtaACGC T...GC AGAGGgCTtG CCCGTGTtGA TCTT | 1117 |
| vanB | U94527 | GTAAAC AGtaCGGAaG AAcTaaACCC T...GC AGAGGgCTtG CtCGTGTtGA TCTT | — |
| vanB | U94528 | GTAAAc gGtaCGGAaG AAcTtaACGC T...GC AGAGGgCTtG CCCGTGTtGA TCTT | — |
| vanB | U94529 | GTAAAc gGtaCGGAaG AAcTtaACGC T...GC AGAGGgCTtG CCCGTGTtGA TCTT | — |
| vanB | U94530 | GTAAAc gGtaCGGAaG AAcTtaACGC T...GC AGAGGgCTtG CCCGTGTtGA TCTT | — |
| vanB | Z83305 | GTAAAc gGtaCGGAaG AAcTtaACGC T...GC AGAGGgCTtG CCCGTGTtGA TCTT | — |
| vanB | U81452 | GTAAAc gGtaCGGAaG AAcTtaACGC T...GC AGAGGgCTtG CCCGTGTtGA TCTT | — |
| vanB | U35369 | GTAAAc AGtaCGGAaG AAcTaaACGC T...GC AGACGgCTtG CtCGTGTtGA TCTT | — |
| vanB | U72704 | GTAAAc gGtaCGGAaG AAcTtaACGC T...GC AGAGGgCTtG CCCGTGTtGA TCTT | — |
| vanB | L06138 | CTAAAc AGtaCGGAaG AAcTaaACCC T...GC AGAGGgCTtG CtCGTGTtGA TCTT | — |
| vanB | L15304 | GTAAAc gGtaCGGAaG AAcTtaACGC T...GC AGAGGgCTtG CCCGTGTtGA TCTT | — |
| vanB | U00456 | GTAAAc AGtaCGGAaG AAcTaaACCC T...GC AGAGGgCTtG CtCGTGTtGA TCTT | — |
| vanD | AF130997 | GTAtgc AagGCaGAaG AAcTGcAgGC A...GC AGAGGatTgG CCCGcaTtGA cCTG | — |
| vanE | AF136925 | GTAgAa caaaaaagtG AtTTatAtAA A...GC AaAGGatTAG CgaGaaTcGA cTTT | — |

| | | |
|---|---|---|
| Selected sequence | AAT AGCGCGGACG AATTGGAC | 1090 |
| for amplification | | |
| primer | | |
| Selected sequence | GAGGTCTAG CCCGTGTGGA T | 1089 |
| for amplification | | |
| primer^{a} | | |

The sequence numbering refers to the Enterococcus faecium vanA gene fragment (SEQ ID NO. 1139).
Nucleotides in capitals are identical to the selected sequences or match those sequences.
Mismatches are indicated by lowercase letters.
Dots indicate gaps in the sequences
^{a}This sequence is the reverse-complement of the above selected primer.

ANNEX XXIX

Strategy for the selection of vanB-specific
amplification primers from van sequences.

| | | |
|---|---|---|
| Accession # | 470 495 608 633 | SEQ ID NO. |

| | | | |
|---|---|---|---|
| vanA | X56895 | A CGCaATtGAA tCgGCAaGAC AATAT...ACG GaATCTTtCG tATtCATCAG GAA | 1139 |
| vanA | M97297 | A CGCaATtGAA tCgGCAaGAC AATAT...ACG GaATCTTtCG tATtCATCAG GAA | 1141 |
| vanA | — | A CGCaATtGAA tCgGCAaGAC AATAT...ACG GaATCTTtCG tATtCATCAG GAA | 1051 |
| vanA | — | A CGCaATtGAA tCgGCAaGAC AATAT...ACG GaATCTTtCG tATtCATCAG GAA | 1052 |
| vanA | — | A CGCaATtGAA tCgGCAaGAC AATAT...ACG GaATCTTtCG tATtCATCAG GAA | 1053 |
| vanA | — | A CGCaATtGAA tCgGCAaGAC AATAT...ACG GaATCTTtCG tATtCATCAG GAA | 1054 |
| vanA | — | A CGCaATtGAA tCgGCAaGAC AATAT...ACG GaATCTTtCG tATtCATCAG GAA | 1055 |
| vanA | — | A CGCaATtGAA tCgGCAaGAC AATAT...ACG GaATCTTtCG tATtCATCAG GAA | 1056 |
| vanA | — | A CGCaATtGAA tCgGCAaGAC AATAT...ACG GaATCTTtCG tATtCATCAG GAA | 1057 |
| vanA | — | A CGCaATtGAA tCgGCAaGAC AATAT...ACG GaATCTTtCG tATtCATCAG GAA | 1049 |
| vanA | — | A CGCaATtGAA tCgGCAaGAC AATAT...ACG GaATCTTtCG tATtCATCAG GAA | 1050 |
| vanB | U94526 | C TGCGATAGAA GCgGCAGGAC AATAT...ACG GTATCTTCCG CATCCATCAG GAA | 1117 |
| vanB | U94527 | C TGCGATAGAA GCAGCAGGAC AATAT...ACG GTATCTTCCG CATCCATCAG GAA | — |
| vanB | U94528 | C TGCGATAGAA GCgGCAGGAC AATAT...ACG GTATCTTCCG CATCCATCAG GAA | — |
| vanB | U94529 | C TGCGATAGAA GCgGCAGGAC AATAT...ACG GTATCTTCCG CATCCATCAG GAA | — |
| vanB | U94530 | C TGCGATAGAA GCgGCAGGAC AATAT...ACG GTATCTTCCG CATCCATCAG GAA | — |
| vanB | Z83305 | C TGCGATAGAA GCgGCAGGAC AATAT...ACG GTATCTTCCG CATCCATCAG GAA | — |
| vanB | U81452 | C TGCGATAGAA GCgGCAGGAC AATAT...ACG GTATCTTCCG CATCCATCAG GAA | — |
| vanB | U35369 | C TGCGATAGAA GCAGCAGGAC AATAT...ACG GTATCTTCCG CATCCATCAG GAA | — |
| vanB | U72704 | C TGCGATAGAA GCgGCAGGAC AATAT...ATG GTATCTTCCG CATCCATCAG GAA | — |
| vanB | L06138 | C TGCGATAGAA GCAGCAGGAC AATAT...ACG GTATCTTCCG CATCCATCAG GAA | — |
| vanB | L15304 | C TGCGATAGAA GCgGCAGGAC AATAT...ACG GTATCTTCCG CATCCATCAG GAA | — |
| vanB | U00456 | C TGCGATAGAA GCAGCAGGAC AATAT...ACG GTATCTTCCG CATCCATCAG GAA | — |
| vanD | AF130997 | C AGCaATcGAA GaAGCAaGAa AATAT...ACG GctTtTTtaa gATtCATCAG GAA | — |
| vanE | AF136925 | A AGCaATAGAc GaAGCttcAa AATAT...ATG GctTtTTCga CtatgAagAG AAA | — |

| | | |
|---|---|---|
| Selected sequence | CGATAGAA GCAGCAGGAC AA | 1095 |
| for amplification | | |
| primer | | |
| Selected sequence | GTATCTTCCG CATCCATCAG | 1096 |
| for amplification | | |
| primer^{a} | | |

The sequence numbering refers to the Enterococcus faecium vanB gene fragment (SEQ ID NO. 1117).
Nucleotides in capitals are identical to the selected sequences or match those sequences.
Mismatches are indicated by lowercase letters.
Dots indicate gaps in the sequences displayed.
^{a}This sequence is the reverse-complement of the above vanB sequence.

ANNEX XXX

Strategy for the selection of vanC-specific
amplification primers from vanC sequences.

| | | |
|---|---|---|
| Accession # | 929 957 1064 1092 | SEQ ID NO. |

| | | | |
|---|---|---|---|
| vanC1 | — | GT CGACGGTTTT TTTGATTTTG AAGAGAA...ACGGGTC TGGCTCGAAT CGATTTTTTC GT | 1058 |
| vanC1 | — | GT CGACGGTTTT TTTGATTTTG AAGAGAA...ACGGGTC TGGCTCGAAT CGATTTTTTC GT | 1059 |
| vanC1 | M75132 | GT CGACGGTTTT TTTGATTTTG AAGAGAA...ACGGGTC TGGCTCGAAT CGATTTTTTC GT | 1138 |
| vanC2 | — | GT AGACGGCTTT TTCGATTTTG AAGAGAA...AAAGGTC TTGCTCGCAT CGACTTTTTT GT | 1060 |
| vanC2 | — | GT AGACGGCTTT TTCGATTTTG AAGAGAA...AAAGGTC TTGCTCGCAT CGACTTTTTT GT | 1061 |
| vanC2 | — | GT AGACGGCTTT TTCGATTTTG AAGAAAA...AAAGGTC TTGCTCGCAT CGACTTTTTT GT | 1062 |
| vanC2 | — | GT AGACGGCTTT TTCGATTTTG AAGAGAA...AAAGGTC TTGCTCGCAT CGACTTTTTT GT | 1063 |
| vanC2 | L29638 | GT AGACGGCTTT TTCGATTTTG AAGAAAA...AAAGGTC TTGCTCGCAT CGACTTTTTT GT | — |
| vanC2 | L29638 | GT AGACGGCTTT TTCGATTTTG AAGAGAA...AAAGGTC TTGCTCGCAT CGACTTTTTT GT | — |
| vanC3 | — | GT AGACGGCTTT TTCGATTTTG AAGAGAA...AAAGGTC TTGCTCGCAT CGACTTTTTT GT | 1064 |
| vanC3 | — | GT AGACGGCTTT TTCGATTTTG AAGAGAA...AAAGGTC TTGCTCGCAT CGACTTTTTT GT | 1065 |
| vanC3 | — | GT AGACGGCTTT TTCGATTTTG AAGAGAA...AAAGGaC TTGCTCGCAT CGACTTTTTT GT | 1066 |
| vanC3 | L29639 | GT AGACGGCTTT TTCGATTTTG AAGAAAA...AAAGGTC TTGCTCGCAT CGACTTTTTT GT | — |

| | | |
|---|---|---|
| Selected sequence | GACGGYTTT TTYGATTTTG AAGA | 1101 |
| for resistance | | |
| primer | | |
| Selected sequence | GGTC TKGCTCGMAT CGAYTTTTT | 1102 |
| for resistance | | |
| primer^{a} | | |

The sequence numbering refers to the vanC1 gene fragment (SEQ ID NO. 1138).
Nucleotides in capitals are identical to the selected sequences or match those sequences.
Mismatches are indicated by lowercase letters.
Dots indicate gaps in the sequence displayed.
“R” “Y” “M” “K” “W” and “S” designate nucleotide positions which are degenerated.
“R” stands for A or G;
“Y” stands for C or T;
“W” stands for A or C;
“K” stands for G or T;
“W” stands for A or T;
“D” stands for C or G.
“I” stands for inosine which is a nucleotide analog that can bind to any of the four nucleotides A, C,, G or T.
^{a}This sequence is the reverse-complement of the selected sequence.

ANNEX XXXI

Strategy for the selection of Streptococcus pneumoniae-specific
amplification primers and hybridization probes from pbp1a sequences.

| | | |
|---|---|---|
| Accession # | 453 505 678 | SEQ ID NO.: |

| | | | |
|---|---|---|---|
| pbp1a | M90528 | A TTGACTAcCC AAGCATaCAc TATGCtAAtG CtATTTCAAG TAATACAACC GA...TATATG | — |
| pbp1a | X67873 | A TCGACTAcCC AAGtATtCAc TActCAAAtG CCATTTCAAG TAACACAACC GA...TATATG | — |
| pbp1a | AB006868 | A TCGACTAcCC AAGtATtCAc TActCAAAtG CCATTTCAAG TAACACAACC GA...TATATG | — |
| pbp1a | AF046234 | A TCGACTAcCC AAGtATtCAc TActCAAAtG CCATTTCAAG TAACACAACC GA...TATATG | — |
| pbp1a | | A TCGACTAcCC AAGtATtCAc TActCAAAtG CCATTTCAAG TAACACAACC GA...TATATG | 1014 |
| pbp1a | | A TCGACTAcCC AAGtATtCAc TActCAAAtG CCATTTCAAG TAACACAACC GA...TACATG | 1017 |
| pbp1a | AB006873 | A TCGACTAcCC AAGtcTtCAc TActCAAAtG CCATTTCAAG TAAcACAACC GA...TATATG | — |
| pbp1a | AF139883 | A TCGACTATCC AAGCATGCAT TATCCAAACG CCATTTCAAG TAATACAACA GA...TATATG | 1169 |
| pbp1a | | A TCGACTATCC AAGCATGCAT TATGCAAACG CCATTTCAAG TAATACAACA GA...TATATG | 1004 |
| pbp1a | | A TCGACTATCC AAGCATGCAT TATGCAAACG CCATTTCAAG TAATACAACA GA...TATATG | 1007 |
| pbp1a | | A TCGACTATCC AAGCATGCAT TATGCAAACG CCATTTCAAG TAATACAACA GA...TATATG | 1008 |
| pbp1a | | A TCGACTATCC AAGCATGCAT TATGCAAACG CCATTTCAAG TAATACAACA GA...TATATG | 1009 |
| pbp1a | | A TCGACTATCC AAGCATGCAT TATGCAAACG CCATTTCAAG TAATACAACA GA...TATATG | 1011 |
| pbp1a | AF159448 | A TCGACTATCC AAGCATGCAT TATGCAAACG CCATTTCAAG TAATACAACA GA...TATATG | — |
| pbp1a | | A TCGACTATCC AAGCATGCAT TATGCAAACG CCATTTCAAG TAATACAACA GA...TACATG | 1005 |
| pbp1a | | A TCGACTATCC AAGCATGCAT TATGCAAACG CCATTTCAAG TAATACAACA GA...TACATG | 1015 |
| pbp1a | | A TCGACTATCC AAGCATGCAT TATGCAAACG CCATTTCAAG TAATACAACA GA...TACATG | 1006 |
| pbp1a | | A TCGACTATCC AAGCATGCAT TATGCAAACG CCATTTCAAG TAATACAACA GA...TACATG | 1012 |
| pbp1a | X67867 | A TCGACTATCC AAGCATGCAT TATGCAAACG CCATTTCAAG TAATACAACA GA...TACATG | — |
| pbp1a | | A TCGACTATCC AAGCATGCAT TATGCAAACG CCATTTCAAG TAAcACAACT GA...TATATG | 1010 |
| pbp1a | Z49094 | A TCGACTATCC AAGCATGCAT TATGCAAACG CCATTTCAAG TAAcACAACT GA...TATATG | — |
| pbp1a | | A TCGACTATCC AAGCATGCAT TATGCAAACG CCATTTCAAG TAAcACAACT GA...TATATG | 1013 |
| pbp1a | | A TCGACTATCC AAGCATGCAT TATGCAAACG CCATTTCAAG TAAcACAACT GA...TATATG | 1016 |
| pbp1a | X67870 | A TCGACTATCC AAGtATGCAT TAcGCAAACG CCATTTCAAG TAACACAACT GA...TATATG | — |
| pbp1a | | A TTGACTATCC AAGtATtCAc TActCAAAtG CtATTTCAAG TAATACAACT GA...TATATG | 1018 |
| pbp1a | AJ002290 | A TTGAtTAcCC AActATGgtc TATGCtAACG CtATTTCAAG TAATACAACT GA...TACATG | — |
| pbp1a | X67871 | A TCGACTAcCC AAGtcTtCAc TActCAAAtG CCATTTCAAG TAAcACAACC GA...TACATG | — |

| | | |
|---|---|---|
| Selected sequences | GACTATCC AAGCATGCAT TATG | 1130 |
| for amplification | ATG | |
| primers | | |
| Selected sequence | CAAACG CCATTTCAAG TAATACAAC | 1197 |
| for hybridization | | |
| probe | | |

| | | |
|---|---|---|
| Accession # | 706 | SEQ ID NO.: |

| | | | |
|---|---|---|---|
| pbp1a | M90528 | ATGACaGAtA TGATGAAAAC CGT... | — |
| pbp1a | X67873 | ATGACCGAAA TGATGAAAAC AGT... | — |
| pbp1a | AB006868 | ATGACCGACA TGATGAAAAC AGT... | — |
| pbp1a | AF046234 | ATGACCGAAA TGATGAAAAC TGT... | — |
| pbp1a | | ATGACCGACA TGATGAAAAC TGT... | 1014 |
| pbp1a | | ATGACCGAAA TGATGAAAAC TGT... | 1017 |
| pbp1a | AB006873 | ATGACCGACA TGATGAAAAC AGT... | — |
| pbp1a | AF139883 | ATGACCGACA TGATGAAAAC AGT... | 1169 |
| pbp1a | | ATGACCGACA TGATGAAAAC AGT... | 1004 |
| pbp1a | | ATGACCGACA TGATGAAAAC AGT... | 1007 |
| pbp1a | | ATGACCGACA TGATGAAAAC AGT... | 1008 |
| pbp1a | | ATGACCGACA TGATGAAAAC AGT... | 1009 |
| pbp1a | | ATGACCGACA TGATGAAAAC AGT... | 1011 |
| pbp1a | AF159448 | ATGACCGACA TGATGAAAAC AGT... | — |
| pbp1a | | ATGACCGAAA TGATGAAAAC TGT... | 1005 |
| pbp1a | | ATGACCGAAA TGATGAAAAC TGT... | 1015 |
| pbp1a | | ATGACCGAAA TGATGAAAAC TGT... | 1006 |
| pbp1a | | ATGACCGAAA TGATGAAAAC TGT... | 1012 |
| pbp1a | X67867 | ATGACCGAAA TGATGAAAAC TGT... | — |
| pbp1a | | ATGACtGAAA TGATGAAAAC TGT... | 1010 |
| pbp1a | Z49094 | ATGACtGAAA TGATGAAAAC TGT... | — |
| pbp1a | | ATGACtGAAA TGATGAAAAC TGT... | 1013 |
| pbp1a | | ATGACtGAAA TGATGAAAAC TGT... | 1016 |
| pbp1a | X67870 | ATGACCGAAA TGATGAAAAC TGT... | — |
| pbp1a | | ATGACtGAAA TGATGAAAAC TGT... | 1018 |
| pbp1a | AJ002290 | ATGACtGAAA TGATGAAAAC AGT... | — |
| pbp1a | X67871 | ATGACaGAAA TGATGAAAAC AGT... | — |

| | | |
|---|---|---|
| Selected sequences | | |
| for amplification | ATGACHGAMA TGATGAAAAC | 1129 |
| primers | | |
| Selected sequence | | |
| for hybridization | | |
| probe | | |

The sequence numbering refers to the Streptococcus pneumoniae pbp1a gene fragment (SEQ ID NO. 1004).
Nucleotides in capitals are identical to the selected sequences or match those sequences.
Mismatches are indicated by lower-case letters.
Dotes indicate gaps in the sequences displayed.
“R” “Y” “N” “K” “W” and “S” designate nucleotide positions which are degenerated.
“R” stands for A or G;
“Y” stands for C or T;
“N” stands for A or C;
“K” stands for G or T;
“W” stands for A or T;
“H” stands for A, C or T;
“S” stands for C or G.
“I” stands for inosine which is a nucleotide analog that can bind to any of the four
nucleotides A, C, G or T.

| | | |
|---|---|---|
| Accession # | 756 783 813 840 | SEQ ID NO.: |

| | | | |
|---|---|---|---|
| pbp1a | M90528 | ...GCTGGTAA aACtCGTACg TCaAACTATA...A ATACgGGTTA TGTAGCTCCG GAcGAAA | — |
| pbp1a | X67873 | ...GCTGGTAA aACAGGaACc TCTAACTATA...A CCtCTcaaTt TGTACCaCCt GATCAAC | — |
| pbp1a | AB006868 | ...GCTGGTAA aACACGaACc TCTAACTATA...A CCtCTcaaTt TCTAGCaCCt CAcCAAC | — |
| pbp1a | AF046234 | ...GCAGGTAA aACAGGTACT TCTAACTATA...A ACACTGGTTA CGTAGCTCCA GATGAAA | — |
| pbp1a | | ...GCACGTAA aACAGCTACT TCTAACTATA...A ACACTGGTTA CCTACCTCCA GATGAAA | 1014 |
| pbp1a | | ...GCTGGTAA GACAGGTACT TCTAACTACA...A ACACTGGCTA TGTAGCTCCA GATGAAA | 1017 |
| pbp1a | AB006873 | ...GCAGGTAA GACAGGTACT TCTAACTATA...A ACACTGGCTA CGTAGCTCCA GATGAAA | — |
| pbp1a | AF139883 | ...GCTGGTAA aACAGGaACc TCTAACTATA...A ACACTCGCTA TGTAGCTCCA GATGAAA | 1169 |
| pbp1a | | ...GCTGGTAA aACAGGaACc TCTAACTATA...A ACACTGGCTA TGTAGCTCCA GATGAAA | 1004 |
| pbp1a | | ...GCTGGTAA aACAGGaACc TCTAACTATA...A ACACTGGCTA TGTAGCTCCA GATGAAA | 1007 |
| pbp1a | | ...GCTGGTAA aACAGGaACc TCTAACTATA...A ACACTGGCTA TGTAGCTCCA GATGAAA | 1008 |
| pbp1a | | ...GCTGGTAA aACAGGaACc TCTAACTATA...A ACACTGGCTA TGTAGCTCCA GATGAAA | 1009 |
| pbp1a | | ...GCTGGTAA aACAGGaACc TCTAACTATA...A ACACTGGCTA TGTAGCTCCA GATGAAA | 1011 |
| pbp1a | AF159448 | ...GCTGGTAA aACAGGaACC TCTAACTATA...A ACACTGGCTA TGTAGCTCCA GATGAAA | — |
| pbp1a | | ...GCTGGTAA GACAGGTACT TCTAACTACA...A ACACTGGCTA TGTAGCTCCA GATGAAA | 1005 |
| pbp1a | | ...GCTGGTAA GACAGGTACT TCTAACTACA...A ACACTGGCTA TGTAGCTCCA GATGAAA | 1015 |
| pbp1a | | ...GCTGGTAA GACAGGTACT TCTAACTACA...A ACACTGGCTA TGTAGCTCCA GATGAAA | 1006 |
| pbp1a | | ...GCTGGTAA GACACGTACT TCTAACTACA...A ACACTGGCTA TGTAGCTCCA GATGAAA | 1012 |
| pbp1a | X67867 | ...GCTGGTAA GACAGGTACT TCTAACTACA...A ACACTGGCTA TGTAGCTCCA GATGAAA | — |
| pbp1a | | ...GCAGGTAA GACAGGTACT TCTAACTATA...A ACACTGGTTA CGTAGCTCCA GATGAAA | 1010 |
| pbp1a | Z49094 | ...GCAGGTAA GACAGGTACT TCTAACTATA...A ACACTGGTTA CGTAGCTCCA GATGAAA | — |
| pbp1a | | ...GCAGGTAA GACAGGTACT TCTAACTATA...A ACACTGGCTA CGTAGCTCCA GATGAAA | 1013 |
| pbp1a | | ...GCAGGTAA GACAGGTACT TCTAACTATA...A ACACTGGCTA CGTAGCTCCA GATGAAA | 1016 |
| pbp1a | X67870 | ...GCAGGTAA GACAGGTACT TCTAACTATA...A ACACTGGCTA CGTAGCTCCA GATGAAA | — |
| pbp1a | | ...GCAGGTAA GACAGGTACT TCTAACTATA...A ACACTGGCTA CGTAGCTCCA GATGAAA | 1018 |
| pbp1a | AJ002290 | ...GCAGGTAA GACgGGTACa TCTAACTACA...A ACACTGGCTA C~~~~~~~~~ ~~~~~~~ | — |
| pbp1a | X67871 | ...GCTGGTAA aACAGGTACc TCTAACTATA...A ACACTGGTTA CGTAGCTCCA GATGAAA | — |

| | | |
|---|---|---|
| Selected sequence | GGTAA GACAGGTACT TCTAACT | 1193 |
| for hybridization | | |
| probe | | |
| Selected sequence | ACTGGYTA YGTAGCTCCA GATG | 1131 |
| for amplification | | |
| primer^{a} | | |

The sequence numbering refers to the Streptococcus pneumoniae pbp1a gene fragment (SEQ ID NO. 1004).
Nucleotides in capitals are identical to the selected sequences or match those sequences.
Mismatches are indicated by lower case letters.
Dots indicate gaps in the sequences displayed.
“~” indicates incomplete sequence data.
“R” “Y” “W” “and “S” designate nucleotide positions which are degenerated.
“R” stands for A or G;
“Y” stands for C or T;
“W” stands for A or T;
“S” stands for C or G.
“I” stands for inosine which is a nucleotide analog that can bind to any of the four nucleotides A, C, G or T.
This sequence is the reverse-complement of the selected primer.

ANNEX XXXII

Specific and ubiquitous primers for nucleic
acid amplification (toxin sequences).

Originating DNA fragment

| | | | Nucleotide |
|---|---|---|---|
| SEQ ID NO. | Nucleotide sequence | SEQ ID NO. | position |
| Toxin gene: | cdtA | | |
| 2123 | 5′-TCT ACC ACT GAA GCA TTA C | 2129^{a} | 442-460 |
| 2124^{b} | 5′-TAG GTA CTG TAG GTT TAT TG | 2129^{a} | 580-599 |
| Toxin gene: | cdtB | | |
| 2126 | 5′-ATA TCA GAG ACT GAT GAG | 2130^{a} | 2665-2682 |
| 2127^{b} | 5′-TAG CAT ATT CAG AGA ATA TTG T | 2130^{a} | 2746-2767 |
| Toxin gene: | stx₁ | | |
| 1081 | 5′-ATG TCA GAG GGA TAG ATC CA | 1076^{a} | 233-252 |
| 1080^{b} | 5′-TAT AGC TAC TGT CAC CAG ACA ATG T | 1076^{a} | 394-418 |
| Toxin gene: | stx₂ | | |
| 1078 | 5′-AGT TCT GCG TTT TGT CACTGT C | 1077^{a} | 546-567 |
| 1079^{b} | 5′-CGG AAG CAC ATT GCT GAT T | 1077^{a} | 687-705 |
| Toxin genes: | stx₁ and stx₂ | | |
| 1082 | 5′-TTG ARC RAA ATA ATT TAT ATG TG | 1076^{a} | 278-300 |
| 1083^{b} | 5′-TGA TGA TGR CAA TTC AGT AT | 1076^{a} | 781-800 |

^{a}Sequences from databases.
^{b}These sequences are from the complementary DNA strand of the sequence of the originating fragment given in the Sequence Listing.

ANNEX XXXIII

Molecular beacon internal hybridization probes
for specific detection of toxin sequences.

Originating DNA fragment

| | | | Nucleotide |
|---|---|---|---|
| SEQ ID NO. | Nucleotide sequence^{a} | SEQ ID NO. | position |
| Toxin gene: | cdtA | | |
| 2125^{b} | 5′-CAC GCG GAT TTT GAA TCT CTT CCT CTA | 2129^{c} | 462-488 |
| | GTA GCG CGT G | | |
| Toxin gene: | cdtB | | |
| 2128 | 5′-CAA CGC TGG AGA ATC TAT ATT TGT AGA | 2130^{c} | 2714-2740 |
| | AAC TGC GTT G | | |
| Toxin gene: | stx₁ | | |
| 1084 | 5′-CCA CGC CGC TTT GCT GAT TTT TCA CAT | 1076^{c} | 337-363 |
| | GTT ACC GCG TGG | | |
| 2012^{d} | 5′-CCG CGG ATT ATT AAA CCG CCC TTC CGC | 1076^{c} | 248-264 |
| | GG-MR-HEG-ATG TCA GAG GGA TAG ATC CA | | |
| Toxin gene: | stx₂ | | |
| 1085 | 5′-CCA CGC CAC TGT CTG AAA CTG CTC CTG | 1077^{c} | 617-638 |
| | TG CGT GG | | |

^{a}Underlined nucleotides indicate the molecular beacon's stem.
^{b}These sequences are from the complementary DNA strand of the sequence of the originating fragment given in the Sequence Listing.
^{c}Sequences from databases.
^{d}Scorpion primer.

ANNEX XXXIV

Specific and ubiquitous primers for
nucleic acid amplification (van sequences).

Originating DNA fragment

| | | | |
|---|---|---|---|
| | | SEQ ID | Nucleotide |
| SEQ ID NO. | Nucleotide sequence | NO. | position |

| | | | |
|---|---|---|---|
| Resistance gene: | vanA | | |
| 1086 | 5′-CTA CTC CCG CCT TTT GGG TT | 1049-1057^{a} | 513-532^{b} |
| 1087^{c} | 5′-CTC ACA GCC CGA AAC AGC CT | 1049-1057^{a} | 699-718^{b} |
| 1086 | 5′-CTA CTC CCG CCT TTT GGG TT | 1049-1057^{a} | 513-532^{b} |
| 1088^{c} | 5′-TGC CGT TTC CTG TAT CCG TC | 1049-1057^{a} | 885-904^{b} |
| 1086 | 5′-CTA CTC CCG CCT TTT GGG TT | 1049-1057^{a} | 513-532^{b} |
| 1089^{c} | 5′-ATC CAC ACG GOC TAG ACC TC | 1049-1057^{a} | 933-952^{b} |
| 1090 | 5′-AAT AGC GCG GAC GAA TTG GAC | 1049-1057^{a} | 629-649^{b} |
| 1091^{c} | 5′-AAC GCG GCA CTG TTT CCC AA | 1049-1057^{a} | 734-753^{b} |
| 1090 | 5′-AAT AGC GCG GAC GAA TTG GAC | 1049-1057^{a} | 629-649^{b} |
| 1089^{c} | 5′-ATC CAC ACG GGC TAG ACC TC | 1049-1057^{a} | 933-952^{b} |
| 1092 | 5′-TCG GCA AGA CAA TAT GAC AGC | 1049-1057^{a} | 662-682^{b} |
| 1088^{c} | 5′-TGC CGT TTC CTG TAT CCG TC | 1049-1057^{a} | 885-904^{b} |
| Resistance gene: | van.B | | |
| 1095 | 5′-CGA TAG AAG CAG CAG GAC AA | 1117^{d} | 473-492 |
| 1096^{c} | 5′-CTG ATG GAT GCG GAA GAT AC | 1117^{d} | 611-630 |
| Resistance genes: | | | |
| 1112 | 5′-GGC TGY GAT ATT CAA AGC TC | 1049-1057, 1117^{a} | 437-456^{b} |
| 1113^{c} | 5′-ACC GAC CTC ACA GCC CGA AA | 1049-1057, 1117^{a} | 705-724^{b} |
| 1112 | 5′-GGC TGY GAT ATT CAA AGC TC | 1049-1057, 1117^{a} | 437-456^{b} |
| 1114^{c} | 5′-TCW GAG CCT TTT TCC GGC TCG | 1049-1057, 1117^{a} | 817-837^{b} |
| 1115 | 5′-TTT CGG GCT GTG AGG TCG GBT GHG CG | 1049-1057, 1117^{a} | 705-730^{b} |
| 1114^{c} | 5′-TCW GAG CCT TTT TCC GGC TCG | 1049-1057, 1117^{a} | 817-837^{b} |
| 1116 | 5′-TTT CGG GCT GTG AGG TCG GBT GHG CGG | 1049-1057, 1117^{a} | 705-731^{b} |
| 1114^{c} | 5′-TCW GAG CCT TTT TCC GGC TCG | 1049-1057, 1117^{a} | 817-837^{b} |
| 1112 | 5′-GGC TGY GAT ATT CAA AGC TC | 1049-1057, 1117^{a} | 437-456^{b} |
| 1118^{c} | 5′-TTT TCW GAG CCT TTT TCC GGC TCG | 1049-1057, 1117^{a} | 817-840^{b} |

^{a} These sequences were aligned to derive the corresponding primer.
^{b} The nucleotide positions refer to the vanA sequence fragment
(SEQ ID NO. 1051)
^{c} These sequences are from the complementary DNA strand of the sequence of the
originating fragment given in the Sequence Listing.
^{d} Sequences from databases.

| | | | |
|---|---|---|---|
| Resistance genes: | vanA, vanE | | |
| 1115 | 5′-TTT CGG GCT GTG AGG TCG GBT GHG CG | 1049-1057, 1117^{a} | 705-730^{b} |
| 1118^{c} | 5′-TTT TCW GAG CCT TTT TCC GGC TCG | 1049-1057, 1117^{a} | 817-840^{b} |
| 1116 | 5′-TTT CGG GCT GTG AGG TCG GBT GHG CGG | 1049-1057, 1117^{a} | 705-731^{b} |
| 1118^{c} | 5′-TTT TCW GAG CCT TTT TCC GGC TCG | 1049-1057, 1117^{a} | 817-840^{b} |
| 1119 | 5′-TTT CGG GCT GTG AGG TCG GBT GHG C | 1049-1057, 1117^{a} | 705-729^{b} |
| 1118^{c} | 5′-TTT TCW GAG CCT TTT TCC GGC TCG | 1049-1057, 1117^{a} | 817-840^{b} |
| 1120 | 5′-TTT CGG GCT GTG AGG TCG GBT GHG | 1049-1057, 1117^{a} | 705-728^{b} |
| 1111^{c} | 5′-TTT TCW GAG CCT TTT TCC GGC TCG | 1049-1057, 1117^{a} | 817-840^{b} |
| 1121 | 5′-TGT TTG WAT TGT CYG GYA TCC C | 1049-1057, 1117^{a} | 408-429^{b} |
| 1111^{c} | 5′-CTT TTT CCG GCT CGW YTT CCT GAT G | 1049-1057, 1117^{a} | 806-830^{b} |
| 1112 | 5′-GGC TGY GAT ATT CAA AGC TC | 1049-1057, 1117^{a} | 437-456^{b} |
| 1111^{c} | 5′-CTT TTT CCG GCT CGW YTT CCT GAT G | 1049-1057, 1117^{a} | 806-830^{b} |
| 1123 | 5′-TTT CGG GCT GTG AGG TCG GBT G | 1049-1057, 1117^{a} | 705-726^{b} |
| 1111^{c} | 5′-CTT TTT CCG GCT CGW YTT CCT GAT G | 1049-1057, 1117^{a} | 806-830^{b} |
| 1112 | 5′-GGC TGY GAT ATT CAA AGC TC | 1049-1057, 1117^{a} | 437-456^{b} |
| 1124^{c} | 5′-GAT TTG RTC CAC YTC GCC RAC A | 1049-1057, 1117^{a} | 757-778^{b} |
| Resistance gene: | vanC1 | | |
| 1103 | 5′-ATC CCG CTA TGA AAA CGA TC | 1058-1059^{a} | 519-538^{d} |
| 1104^{c} | 5′-GGA TCA ACA CAG TAG AAC CG | 1058-1059^{a} | 678-697^{d} |
| Resistance genes: | vanC1, vanC2, vanC3 | | |
| 1097 | 5′-TCY TCA AAA GGG ATC ACW AAA GTM AC | 1058-1066^{a} | 607-632^{d} |
| 1098^{c} | 5′-TCT TCA AAA TCG AAA AAG CCG TC | 1058-1066^{a} | 787-809^{d} |
| 1099 | 5′-TCA AAA GGG ATC ACW AAA GTM AC | 1058-1066^{a} | 610-632^{d} |
| 1100^{c} | 5′-GTA AAK CCC GGC ATR GTR TTG ATT TC | 1058-1066^{a} | 976-1001^{d} |
| 1101 | 5′-GAC GGY TTT TTY GAT TTT GAA GA | 1058-1066^{a} | 787-809^{d} |
| 1102^{c} | 5′-AAA AAR TCG ATK CGA GCM AGA CC | 1058-1066^{a} | 922-944^{d} |
| Resistance genes: | vanC2, vanC3 | | |
| 1105 | 5′-CTC CTA CGA TTC TCT TGA YAA ATC A | 1060-1066, 1140^{a} | 487-511^{e} |
| 1106^{c} | 5′-CAA CCG ATC TCA ACA CCG GCA AT | 1060-1066, 1140^{a} | 690-712^{e} |

^{a} These sequences were aligned to derive the corresponding primer.
^{b} The nucleotide positions refer to the vanA sequence fragment
(SEQ ID NO. 1051)
^{c} These sequences are from the complementary DNA strand of the sequence of the
originating fragment given in the Sequence Listing.
^{d} The nucleotide positions refer to the vanC1 sequence fragment
(SEQ ID NO. 1058)
^{e} The nucleotide positions refer to the vanc2 sequence fragment
(SEQ ID NO. 1140)

| | | | |
|---|---|---|---|
| Resistance gene: | vanD | | |
| 1591 | 5′-ATG AGG TAA TAG AAC GGA TT | 1594 | 797-837 |
| 1592^{b} | 5′-CAG TAT TTC AGT AAG CGT AAA | 1594 | 979-999 |
| Resistance gene: | vanE | | |
| 1595 | 5′-AAA TAA TGC TCC ATC AAT TTG CTG A | 1599^{a} | 74-98 |
| 1596^{b} | 5′-ATA GTC GAA AAA GCC ATC CAC AAG | 1599^{a} | 394-417 |
| 1597 | 5′-GAT GAA TTT GCG AAA ATA CAT GGA | 1599^{a} | 163-186 |
| 1598^{b} | 5′-CAG CCA ATT TCT ACC CCT TTC AC | 1599^{a} | 319-341 |
| | Sequencing primers (vanA.B) | | |
| 1112 | 5′-GGC TGY GAT ATT CAA AGC TC | 1139^{a} | 737-756 |
| 1111^{b} | 5′-CTT TTT CCG GCT CGW YTT CCT GAT G | 1139^{a} | 1106-1130 |
| | Sequencing primers (vanA, vanX, vanY) | | |
| 1150 | 5′-TGA TAA TCA CAC CGC ATA CG | 1141^{a} | 860-879 |
| 1151^{b} | 5′-TGC TGT CAT ATT GTC TTG CC | 1141^{a} | 1549-1568 |
| 1152 | 5′-ATA AAG ATG ATA GGC CGG TG | 1141^{a} | 1422-1441 |
| 1153^{b} | 5′-CTC GTA TGT CCC TAC AAT GC | 1141^{a} | 2114-2133 |
| 1154 | 5′-GTT TGA AGC ATA TAG CCT CG | 1141^{a} | 2520-2539 |
| 1155^{b} | 5′-CAG TGC TTC ATT AAC GTA GTC | 1141^{a} | 3089-3109 |

^{a} Sequences from databases.
^{b} These sequences are from the complementary DNA strand of the sequence of the
originating fragment given in the Sequence Listing.

| | | | |
|---|---|---|---|
| | Sequencing primers (vanC1) | | |
| 1110 | 5′-ACG AGA AAG ACA ACA GGA AGA CC | 1138^{a} | 122-144 |
| 1109^{b} | 5′-ACA TCG TGA TCG CTA AAA GGA GC | 1138^{a} | 1315-1337 |
| | Sequencing primers (vanC2, vanC3) | | |
| 1108 | 5′-GTA AGA ATC GGA AAA GCG GAA GG | 1140^{a} | 1-23 |
| 1107^{b} | 5′-CTC ATT TGA CTT CCT CCT TTG CT | 1140^{a} | 1064-1086 |

^{a}Sequences from databases.
^{b}These sequences are from the complementary DNA strand of the sequence of the originating fragment given in the Sequence Listing.

ANNEX XXXV

Internal hybridization probes for
specific detection of van sequences.

Originating DNA fragment

| | | | Nucleotide |
|---|---|---|---|
| SEQ ID NO. | Nucleotide sequence | SEQ ID NO. | position |
| Resistance gene: | vanA | | |
| 1170 | 5′-ACG AAT TGG ACT ACG CAA TT | 1049-1057^{a} | 639-658^{b} |
| 2292 | 5′-GAA TCG GCA AGA CAA TAT G | 2293^{c} | 583-601 |
| Resistance gene: | vanE | | |
| 1171 | 5′-ACG AGG ATG ATT TGA TTG TC | 1117c | 560-579 |
| 2294 | 5′-AAA CGA GGA TGA TTT GAT TG | 2296a | 660-679 |
| 2295 | 5′-TTG AGC AAG CGA TTT CGG | 2296a | 614-631 |
| Resistance gene: | vanD | | |
| 2297 | 5′-TTC AGG AGG GGG ATC GC | 1594c | 458-474 |

^{a}These sequences were aligned to derive the corresponding primer.
^{b}The nucleotide positions refer to the vanA sequence fragment (SEQ ID NO. 1051)
^{c}Sequences from databases.

ANNEX XXXVI

Specific and ubiquitous primers for
nucleic acid amplification (pbp sequences).

Originating DNA fragment

| | | | |
|---|---|---|---|
| | | SEQ ID | Nucleotide |
| SEQ ID NO. | Nucleotide sequence | NO. | position |

| | | | |
|---|---|---|---|
| Resistance gene: | pbp1a | | |
| 1129 | 5′-ATG ATG ACH GAM ATG ATG AAA AC | 1004-1018^{a} | 681-703^{b} |
| 1131^{c} | 5′-CAT CTG GAG CTA CRT ARC CAG T | 1004-1018^{a} | 816-837^{b} |
| 1130 | 5′-GAC TAT CCA AGC ATG CAT TAT G | 1004-1018^{a} | 456-477^{b} |
| 1131 | 5′-CAT CTG GAG CTA CRT ARC CAG T | 1004-1018^{a} | 816-837^{b} |
| 2015 | 5′-CCA AGA AGC TCA AAA ACA TCT G | 2047^{d} | 909-930 |
| 2O16^{c} | 5′-TAD CCT GTC CAW ACA GCC AT | 2047^{d} | 1777-1796 |
| | Sequencing primers (pbp1a) | | |
| 1125 | 5′-ACT CAC AAC TGG GAT GGA TG | 1169^{d} | 873-892 |
| 1126^{c} | 5′-TTA TGG TTG TGC TGG TTG AGG | 1169^{d} | 2140-2160 |
| 1125 | 5′-ACT CAC AAC TGG GAT GGA TG | 1169^{d} | 873-892 |
| 1128^{c} | 5′-GAC GAC YTT ATK GAT ATA CA | 1169^{d} | 1499-1518 |
| 1127 | 5′-KCA AAY GCC ATT TCA AGT AA | 1169^{d} | 1384-1403 |
| 1126^{c} | 5′-TTA TGG TTG TGC TGG TTG AGG | 1169^{d} | 2140-2160 |
| | Sequencing primers (pbp2b) | | |
| 1142 | 5′-GAT CCT CTA ART GAT TCT CAG GTG G | 1172^{d} | 1-25 |
| 1143^{c} | 5′-CAR TTA GCT TAG CAR TAG GTG TTG G | 1172^{d} | 1481-1505 |
| 1142 | 5′-GAT CCT CTA ART GAT TCT CAG GTG G | 1172^{d} | 1-25 |
| 1145^{c} | 5′-ARC ATA TTK GGT TGA TAG GT | 1172^{d} | 793-812 |
| 1144 | 5′-TGT YTT CCA AGG TTC AGC TC | 1172^{d} | 657-676 |
| 1143^{c} | 5′-CAR TTA GCT TAG CAA TAG GTG TTG G | 1172^{d} | 1481-1505 |
| | Sequencing primers (pbp2x) | | |
| 1146 | 5′-GGG ATT ACC TAT GCC ART ATG AT | 1173^{d} | 219-241 |
| 1147^{c} | 5′-AGC TGT GTT AGC VCG ARC ATC TTG | 1173^{d} | 1938-1961 |
| 1146 | 5′-GGG ATT ACC TAT GCC ART ATG AT | 1173^{d} | 219-241 |
| 1149^{c} | 5′-TCC YAC WAT TTC TTT TTG WG | 1173^{d} | 1231-1250 |
| 1148 | 5′-GAC TTT GTT TGG CGT GAT AT | 1173^{d} | 711-730 |
| 1147^{c} | 5′-AGC TGT GTT AGC VCG ARC ATC TTG | 1173^{d} | 1938-1961 |

^{a}These sequences were aligned to derive the corresponding primer.
^{b}The nucleotide positions refer to the pbp1a sequence fragment (SEQ ID NO. 1004)
^{c}These sequences are from the complementary DNA strand of the sequence of the originating fragment given in the Sequence Listing.
^{d}Sequences from databases.

ANNEX XXXVII

Internal hybridization probes for
specific detection of pbp sequences.

Originating DNA fragment

| | | SEQ ID | Nucleotide |
|---|---|---|---|
| SEQ ID NO. | Nucleotide sequence | NO. | position |
| Resistance gene: | pbp1a | | |
| 1132 | 5′-AGT GAA AAR ATG GCT GCT GC | 1004-1018^{a} | 531-550b |
| 1133 | 5′-CAT CAA GAA CAC TGG CTA YGT AG | 1004-1018^{a} | 806-828b |
| 1134 | 5′-CTA GAT AGA GCT AAA ACC TTC CT | 1004-1018^{a} | 417-439b |
| 1135 | 5′-CAT TAT GCA AAC GCC ATT TCA AG | 1004-1018^{a} | 471-493b |
| 1192 | 5′-GGT AAA ACA GGA ACC TCT AAC T | 1004-1018^{a} | 759-780b |
| 1193 | 5′-GGT AAG ACA GGT ACT TCT AAC T | 1004-1018^{a} | 759-780b |
| 1194 | 5′-CAT TTC AAG TAA TAC AAC AGA ATC | 1004-1018^{a} | 485-508b |
| 1195 | 5′-CAT TTC AAG TAA CAC AAC TGA ATC | 1004-1018^{a} | 485-508b |
| 1196 | 5′-GCC ATT TCA AGT AAT ACA ACA GAA | 1004-1018^{a} | 483-506b |
| 1197 | 5′-CAA ACG CCA TTT CAA GTA ATA CAA C | 1004-1018^{a} | 478-502b |
| 1094 | 5′-GGT AAA ACA GGT ACT TCT AAC TA | 1004-1018^{a} | 759-781b |
| 1214 | 5′-GGT AAA ACA GGT ACC TCT AAC TA | 1004-1018^{a} | 759-781b |
| 1216 | 5′-GGT AAG ACT GGT ACA TCA AAC TA | 1004-1018^{a} | 759-781b |
| 1217 | 5′-CAA ATG CCA TTT CAA GTA ACA CAA C | 1004-1018^{a} | 478-502b |
| 1218 | 5′-CAA ACG CCA TTT CAA GTA ACA CAA C | 1004-1018^{a} | 478-502b |
| 1219 | 5′-CAA ATG CTA TTT CAA GTA ATA CAA C | 1004-1018^{a} | 478-502b |
| 1220 | 5′-CAA ACG CCA TTT CAA GTA ATA CGA C | 1004-1018^{a} | 478-502b |
| 2017 | 5′-ACT TTG AAT AAG GTC GGT CTA G | 2047c | 1306-1327 |
| 2018 | 5′-ACA CTA AAC AAG GTT GGT TTA G | 2063 | 354-375 |
| 2019 | 5′-ACA CTA AAC AAG GTC GGT CTA G | 2064 | 346-367 |
| 2020 | 5′-GTA GCT CCA GAT GAA ATG TTT G | 2140^{c} | 1732-1753 |
| 2021 | 5′-GTA GCT CCA GAC GAA ATG TTT G | 2057 | 831-852 |
| 2022 | 5′-GTA GCT CCA GAT GAA ACG TTT G | 2053^{c} | 805-826 |
| 2023 | 5′-GTA ACT CCA GAT GAA ATG TTT G | 2056 | 819-840 |
| 2024 | 5′-AGT GAA AAG ATG GCT GCT GC | 2048^{c} | 1438-1457 |
| 2025 | 5′-AGT GAG AAA ATG GCT GCT GC | 2047^{c} | 1438-1457 |
| 2026 | 5′-TCC AAG CAT GCA TTA TGC AAA CG | 2047^{c} | 1368-1390 |
| 2027 | 5′-TCG GTC TAG ATA GAG CTAAAA CG | 2047^{c} | 1319-1341 |
| 2028 | 5′-TAT GCT CTT CAA CAA TCA CG | 2047^{c} | 1267-1286 |
| 2029 | 5′-AGC CGT TGA GAC TTT GAA TAA G | 2047^{c} | 1296-1317 |
| 2030 | 5′-CTT AAT GGT CTT GGT ATC G | 2047^{c} | 1345-1366 |
| 2031 | 5′-CGT GAC TGG GGT TCT GCT ATG A | 2049^{c} | 1096-1117 |
| 2032 | 5′-CGT GAC TGG GGA TCA TCA ATG A | 2047^{c} | 1096-1117 |
| 2033 | 5′-CGT GAC TGG GGT TCT GCC ATG A | 2057 | 195-216 |
| 2034 | 5′-ATC AAG AAC ACT GGC TAT GTA G | 2050^{c} | 787-808 |
| 2035 | 5′-ATC AAG AAC ACT GGC TAC GTA G | 2051^{c} | 787-808 |
| 2036 | 5′-ATC AAG AAC ACT GGT TAC GTA G | 2047 | 1714-1735 |
| 2037 | 5′-ATC AAA AAT ACT GGT TAT GTA G | 2057 | 813-834 |
| 2038 | 5′-ATC AAG AAT ACT GGC TAC GTA G | 2052^{c} | 757-778 |
| 2039 | 5′-ATC AAA AAC ACT GGC TAT GTA G | 2053^{c} | 787-808 |

^{a}These sequences were aligned to derive the corresponding primer.
^{b}The nucleotide positions refer to the pbpla sequence fragment (SEQ ID NO. 1004)
^{c}Sequence from databases

ANNEX XXXVIII
Strategy for the selection of vanAB-specific amplification primers
and vanA- and vanB- specific hybridization probes from van sequences

| | |
|---|---|
| Accession # | SEQ ID NO.: |

| | | | |
|---|---|---|---|
| | | 734 759 936 961 | |
| vanA | X56895 | GTAGGCT GCGATATTCA AAGCTCAGC . . . CGGACGAATT GGACTACGCA ATTGAA. . . | 1139 |
| vanA | M97297 | GTAGGCT GCGATATTCA AAGCTCAGC . . . CGGACGAATT GGACTACGCA ATTGAA. . . | 1141 |
| vanA | | GTAGCCT GCGATATTCA AAGCTCAGC . . . CGGACGAATT GGACTACGCA ATTGAA. . . | 1051 |
| vanA | | GTAGGCT GCGATATTCA AAGCTCAGC . . . CGGACCAATT GGACTACGCA ATTGAA. . . | 1052 |
| vanA | | GTAGGCT CCGATATTCA AAGCTCAGC . . . CGGACGAATT GGACTACGCA ATTGAA. . . | 1053 |
| vanA | | GTAGGCT GCGATATTCA AAGCTCAGC . . . CGGACGAATT GGACTACGCA ATTGAA. . . | 1054 |
| vanA | | GTAGGCT CCGATATTCA AAGCTCAGC . . . CGGACGAATT GGACTACGCA ATTGAA. . . | 1055 |
| vanA | | GTAGGCT GCGATATTCA AAGCTCAGC . . . CGGACGAATT GGACTACGCA ATTGAA. . . | 1056 |
| vanA | | GTAGGCT GCGATATTCA AAGCTCAGC . . . CGGACGAATT GGACTACGCA ATTGAA. . . | 1057 |
| vanA | | GTAGGCT GCGATATTCA AAGCTCAGC . . . CGGACGAATT GGACTACGCA ATTGAA. . . | 1049 |
| vanA | | GTAGGCT GCGATATTCA AAGCTCAGC . . . CGGACGAATT GGACTACGCA ATTGAA. . . | 1050 |
| vanB | U94526 | GTGGGCT GTGATATTCA AAGCTCCGC . . . CGGAaGAAcT taACgctGCg ATaGAA. . . | 1117 |
| vanB | U94527 | CTAGGCT GCGATATTCA AAGCTCCGC . . . CGGAaGAAcT aaACgctGCg ATaGAA. . . | — |
| vanB | U94528 | GTGCGCT GTGATATTCA AAGCTCCGC . . . CGGAaGAAcT taACgctGCg ATaGAA. . . | — |
| vanB | U94529 | GTGGGCT GTGATATTCA AAGCTCCGC . . . CGGAaGAAcT taACgctGCg ATaGAA. . . | — |
| vanB | U94530 | GTGGGCT GTGATATTCA AAGCTCCGC . . . CGGAaGAAcT taACgctGCg ATaGAA. . . | — |
| vanB | Z83305 | GTGCGCT GTGATATTCA AAGCTCCGC . . . CGGAaGAAcT taACgctGCg ATaGAA. . . | — |
| vanB | U81452 | GTGGGCT GTGATATTCA AAGCTCCGC . . . CGGAaGAAcT taACgctGCg ATaGAA. . . | — |
| vanB | U35369 | GTAGGCT GCGATATTCA AAGCTCCGC . . . CGGAaGAAcT aaACgctGCg ATaGAA. . . | — |
| vanB | U72704 | GTGGGCT GCGATATTCA AAGCTCCGC . . . CGGAaGAAcT taACgctGCg ATaGAA. . . | — |
| vanB | L06138 | GTAGGCT GCGATATTCA AAGCTCCGC . . . CGGAaGAAcT aaACgctGCg ATaGAA. . . | — |
| vanB | L15304 | GTGGGCT GTGATATTCA AAGCTCCGC . . . CGGAaGAAcT taACgctGCg ATaGAA. . . | — |
| vanB | U00456 | GTAGGCT GCGATATTCA AAGCTCCGC . . . CGGAaGAAcT aaACgctGCg ATaGAA. . . | — |
| vanD | AF130997 | GTGGGaT GCGATATTCA AAGCTCCGT . . . CAGAaGAAcT GcAggcaGCA ATcGAA. . . | — |
| vanE | AF136925 | GTAGGtT GTGgTATcgg AgctgCAGC . . . AAAgtGAtTT atAtaAaGCA ATaGAC. . . | — |

| | | |
|---|---|---|
| Selected sequence for | GGCT GYGATATTCA AA-CTC | 1112 |
| amplification primer | | |
| Selected sequence for | ACGAATT GGACTACGCA ATT (vanA) | 1170 |
| hybridization probe | | |

The sequence numbering refers to the Enterococcus faecium vanA gene fragment (SEQ ID NO. 1139)
Nucleotides in capitals are identical to the selected sequences or match those sequences.
Mismatches are indicated by lower-case letters.
Dots indicate gaps in the sequences displayed.
“R” “Y” “M” “K” “W” and “S” designate nucleotide positions which are degenerated.
“R” stands for A or G;
“Y” stands for C or T;
“M” stands for A or C;
“K” stands for G or T;
“W” stands for A or T;
“S” stands for C or G.
“I” stands for inosine which is a nucleotide analog that can bind to any of the four
nucleotides A, C, G or T.

| | | | |
|---|---|---|---|
| | | 1038 1063 1103 1133 | |
| vanA | X56895 | GAAACagt GccGcGTTag TTGTtGGC . . . ATT CATCAGGAAG TCGAGCCGGA AAAAGGCT | 1139 |
| vanA | M97297 | GAAACagt GccGcgTTag TTGTtGGC . . . ATT CATCAGGAAG TCGAGCCGGA AAAAGGCT | 1141 |
| vanA | | GAAACagt GccGcgTTag TTGTtGGC . . . ATT CATCAGGAAG TCGAGCCGGA AAAAGGCT | 1051 |
| vanA | | GAAACagt GccGcgTTag cTGTtGGC . . . ATT CATCAGGAAG TCGAGCCGGA AAAAGGGC | T1052 |
| vanA | | GAAACagt GccGcgTTag cTGTtGGC . . . ATT CATCAGGAAG TCGAGCCGGA AAAAGGCT | 1053 |
| vanA | | GAAACagt GccGcgTTag TTGTtGGC . . . ATT CATCAGGAAG TCGAGCCGGA AAAAGGCT | 1054 |
| vanA | | GAAACagt GCCGCgTTag cTGTtGGC . . . ATT CATCAGGAAG TCGAGCCGGA AAAAGGCT | 1055 |
| vanA | | GAAACagt GccGcgTTag cTGTtGGC . . . ATT CATCAGGAAG TCGAGCCGGA AAAAGGCT | 1056 |
| vanA | | GAAACagt GccGcgTTag cTGTtGGC . . . ATT CATCAGGAAG TCGAGCCGGA AAAAGGCT | 1057 |
| vanA | | GAAACagt GccGcgTTag CTGTtGGC . . . ATT CATCAGGAAG TCGAGCCGGA AAAAGGCT | 1049 |
| vanA | | GAAACagt GccGcgTTag cTGTtGGC . . . ATT CATCAGGAAG TCGAGCCGGA AAAAGGCT | 1050 |
| vanB | U94526 | GGAACGAG GATGATTTGA TTGTCGGC . . . ATC CATCAGGAAA ACGAGCCGGA AAAAGGCT | 1117 |
| vanB | U94527 | GAAACGAG GATGATTTGA TTGTCGGC . . . ATC CATCAGGAAA ACGAGCCGGA AAAAGGCT | — |
| vanB | U94528 | GGAACGAG GATGATTTGA TTGTCGGC . . . ATC CATCAGGAAA ACGAGCCGGA AAAAGGCT | — |
| vanB | U94529 | GGAACGAG GATGATTTGA TTGTCGGC . . . ATC CATCAGGAAA ACGAGCCGGA AAAAGGCT | — |
| vanB | U94530 | GGAACGAG GATGATTTGA TTGTCGGC . . . ATC CATCAGGAAA ACGAGCCGGA AAAAGGCT | — |
| vanB | Z83305 | GGAACGAG GATGATTTGA TTGTCGGC . . . ATC CATCAGGAAA ACGAGCCGGA AAAAGGCT | — |
| vanB | U81452 | GGAACGAG GATGATTTGA TTGTCGGC . . . ATC CATCAGGAAA ACGAGCCGGA AAAAGGCT | — |
| vanB | U35369 | GAAACGAG GATGATTTGA TTGTCGGC . . . ATC CATCAGGAAA ACGAGCCGGA AAAAGGCT | — |
| vanB | U72704 | GGAACGAG GATGATTTGA TTGTCGGC . . . ATC CATCAGGAAA ACGAGCCGGA AAAAGGAT | — |
| vanB | L06138 | GAAACGAG GATGATTTGA TTGTCGGC . . . ATC CATCAGGAAA ACGAGCCGGA AAAAGGCT | — |
| vanB | L15304 | GGAACGAG GATGATTTGA TTGTCGGC . . . ATC CATCAGGAAA ACGAGCCGGA AAAAGGCT | — |
| vanB | U00456 | GAAACGAG GATGATTTGA TTGTCGGC . . . ATC CATCAGGAAA ACGAGCCGGA AAAAGGCT | — |
| vanD | AF130997 | GAAACGga aATGATcTCA TgGctGGC . . . ATT CATCAGGAAG cacAGCCGGA aAAGGGAT | — |
| vanE | AF136925 | GAAA...t GAacAaTTGg TcGTtGGA . . . TAT gAagAGaAAt ACaA | TT |

| | | |
|---|---|---|
| Selected sequence for | ACGAG GATGATTTGA TTGTC (vanE) | 1171 |
| hybridization probe | | |
| Selected sequence for | CATCAGGAAR WCGAGCCGGA AAAAG | 1111 |
| amplification primer^{a} | | |

The sequence numbering refers to the Enterococcus faecium vanA gene fragment (SEQ ID NO. 1139)
Nucleotides in capitals are identical to the selected sequences or match those sequences.
Mismatches are indicated by lowercase letters.
Dots indicate gaps in the sequences displayed
“R” and “W” designate nucleotide positions which are degenerated.
“R” stands for A or G;
“W” stands for A or T
^{a}This sequence is the reverse-complement of the above selected primer.

ANNEX XXXIX
Internal hybridization probe for specific detection of mecA.

Originating DNA fragment

| | | | Nucleotide |
|---|---|---|---|
| SEQ ID NO. | Nucleotide sequence | SEQ ID NO. | position |
| Resistance gene: | mecA | | |
| 1177 | 5′-GCT CAA CAA GTT CCA GAT TA | 1178^{a} | 1313-1332 |

^{a}Sequence from databases.

ANNEX XL

Specific and ubiquitous primers for nucleic
acid amplification (hexA sequences).

Originating DNA fragment

| | | | |
|---|---|---|---|
| | | | Nucleotide |
| SEQ ID NO. | Nucleotide sequence | SEQ ID NO. | position |

| | | | |
|---|---|---|---|
| Bacterial species: | Streptococcus pneumoniae | | |
| 1179 | 5′-ATT TGG TGA CGG GTG ACT TT | 1183^{a} | 431-450 |
| 1181^{b} | 5′-AGC AGC TTA CTA GAT GCC GT | 1831-1191^{c} | 652-671^{d} |
| | Sequencing primers | | |
| 1179 | 5′-ATT TGG TGA CGG GTG ACT TT | 1183^{a} | 431-450 |
| 1182^{b} | 5′-AAC TGC AAG AGA TCC TTT GG | 1183^{a} | 1045-1064 |

^{a}Sequences from databases.
^{b}These sequences are from the complementary DNA strand of the sequence of the originating fragment given in the Sequence Listing.
^{c}These sequences were aligned to derive the corresponding primer.
^{d}The nucleotide positions refer to the hexA sequence fragment (SEQ ID NO. 1183)

ANNEX XLI

Internal hybridization probe for
specific detection of hexA sequences.

Originating DNA fragment

| | | | Nucleotide |
|---|---|---|---|
| SEQ ID NO. | Nucleotide sequence | SEQ ID NO. | position |
| Bacterial species: | Streptococcus pneumoniae | | |
| 1180^{a} | 5′-TCC ACC GTT GCC AAT CGC A | 1183-1191^{b} | 629-647^{c} |

^{a}This sequences is from the complementary DNA strand of the sequence of the originating fragment given in the Sequence Listing.
^{b}These sequences were aligned to derive the corresponding primer.
^{c}The nucleotide positions refer to the hexA sequence fragment (SEQ ID NO. 1183)

ANNEX XLII
Strategy for the selection of Streptococcus pneumoniae species-specific
amplification primers and hybridization probe from hexA sequences.

| | | SEQ |
|---|---|---|
| | | ID |
| | | NO. |
| | 428 453 626 | |
| S. pneumoniae | TGG ATTTGGTGAC GGGTGACTTT TAT . . . ATTTG CGATTGGCAA CGGTGGAGCA AACGGCATCT AGTAAGCTGC | |
| S. pneumoniae | ~~~~~~~~~TGAC GGGTGACTTT TAT . . . ATTTG CGATTGGCAA CGGTGGACCA AACGGCATCT AGTAAGCTGC | |
| S. pneumoniae | ~~~~~~~~~TGAC GGGTGACTTT TAT . . . ATTTG CGATTGGCAA CGGTGGAGCA AACGGCATCT AGTAAGCTGC | |
| S. pneumoniae | ~~~~~~~~~TGAC GGGTGACTTT TAT . . . ATTTG CGATTGGCAA CGGTGGAGCA AACGGCATCT AGTAAGCTGC | |
| S. pneumoniae | ~~~~~~~~~TGAC GGGTGACTTT TAT . . . ATTTG CGATTGGCAA CGGTGGAGCA AACGGCATCT AGTAAGCTGC | |
| S. oralis | ~~~~~~~~~~~~~GGGTGACTTT TAT . . . ATCca CGACTGGCAg CtGTCGAGCA AgCGGCAgCT AGTAAGCTcC | |
| S. mitis | ~~~~~~~GGTGAC GGGTGACTTT TAT . . . ATTca CGATTGGCAg CtGTGGAGCA AgcGGCATCT AGTAAaCTGC | |
| S. mitis | ~~~~~~~~~TGAC GGGTGACTTT CAG . . . GCGaG gagcTGtCtc CtaTGGAGCG TcaGGCAgca gGgAAaCTGc | |
| S. mitis | ~~~~~~~~~TGAC GGG-GACTTT CAG . . . GCGAG gaAcTGtCtc CtaTGGAGCG TcaGGCAgcg gGgAAatTGC | |
| Selected | ATTTGGTGAC GGGTGACTTT | 1179 |
| sequence for | | |
| amplification | | |
| primer | | |
| Selected | ACGGCATCT AGTAAGCTGC | |
| sequences for | | |
| amplification | | |
| primers^{a} | | |
| Selected | TG CGATTGGCAA CCGTGGA | 1180 |
| sequence for | | |
| hybridization | | |
| probe^{a} | | |

| | | |
|---|---|---|
| | 674 1042 1067 | |
| S. pneumoniae | TCCA . . . AATCCAAAG GATCTCTTGC AGTTGGC | 1183 |
| S. pneumoniae | TCCA . . . AATCCAAAG GATCTCTTG~~~~~~~~ | 1184 |
| S. pneumoniae | TCCA . . . AATCCAAAG GATCTC~~~~~~~~~~~ | 1185 |
| S. pneumoniae | TCCA . . . AATCCAAAG GATCTCTT~~~~~~~~~ | 1186 |
| S. pneumoniae | TCCG . . . ATCCAAAAG GATCTCTT~~~~~~~~~ | 1187 |
| S. oralis | TCCA . . . ~~~~~~~~~~~~~~~~~~~~~~~~~~ | 1188 |
| S. mitis | TTCA . . . AATCCAAAG GATCTCTT~~~~~~~~~ | 1189 |
| S. mitis | TGGA . . . ~~~~~~~~~~~~~~~~~~~~~~~~~~ | 1190 |
| S. mitis | TAGA . . . AATCCAAAG GATCTCTT~~~~~~~~~ | 1191 |
| Selected | T | 1181 |
| sequences for | CCAAAG GATCTCTTGC AGTT | 1182 |
| amplification | | |
| primers^{a} | | |

The sequence numbering refers to the Streptococcus pneumoniae hexA gene fragment (SEQ ID NO. 1183)
Nucleotides in capitals are identical to the selected sequences or match those sequences.
Mismatches are indicated by lower-case letters.
Dots indicate gaps in the sequences displayed.
“~” indicate in complete sequence data.
^{a}This sequence is the reverse-complement of the selected primer.

ANNEX XLIII

Specific and ubiquitous primers for
nucleic acid amplification (pcp sequence)

Originating DNA fragment

| | | | Nucleotide |
|---|---|---|---|
| SEQ ID NO. | Nucleotide sequence | SEQ ID NO. | position |
| Bacterial species: | Streptococcus pyogenes | | |
| 1211 | 5′-ATT CTT GTA ACA GGC TTT GAT CCC | 1215^{a} | 291-314 |
| 1210^{b} | 5′-ACC AGC TTG CCC AAT ACA AAG G | 1215^{a} | 473-494 |

^{a}Sequences from databases.
^{b}These sequences are from the complementary DNA strand of the sequence of the originating fragment given in the Sequence Listing.

ANNEX XLIV
Specific and ubiquitous primers for nucleic acid amplification
of S. saprophyticus sequences of unknown coding potential.

| 1 | | Originating DNA fragment | |
|---|---|---|---|
| | | SEQ ID | Nucleotide |
| SEQ ID NO. | Nucleotide sequence | NO. | position |

| | | | |
|---|---|---|---|
| Bacterial species: | Staphylococcus saprophyticus | | |
| 1208 | 5′-TCA AAA AGT TTT CTA AAA AAT TTA C | 74, 1093, 1198^{b} | 169-193^{c} |
| 1209^{a} | 5′-ACG GGC GTC CAC AAA ATC AAT AGG A | 74, 1093, 1198^{b} | 355-379^{c} |

^{a}This sequence is from the complementary DNA strand of the sequence of the originating fragment given in the Sequence Listing.
^{b}These sequences were aligned to derive the corresponding primer.
^{c}The nucleotide positions refer to the S. saprophyticus unknown gene sequence fragment (SEQ ID NO. 1198).

ANNEX XLV

Molecular beacon internal hybridization probes for specific
detection of antimicrobial agents resistance gene sequences.

Originating DNA fragment

| | | | |
|---|---|---|---|
| | | | Nucleotide |
| SEQ ID NO. | Nucleotide sequence^{a} | SEQ ID NO. | position |

| | | | |
|---|---|---|---|
| Resistance gene: | gyrA | | |
| 2250 | 5′-CCG TCG GAT GGT GTC GTA TAC CGC GGA GTC | 1954^{b} | 218-243 |
| | GCC GAC GG | | |
| 2251 | 5′-CGG AGC CGT TCT CGC TGC GTT ACA TGC TGG | 1954^{b} | 259-286 |
| | TGG CTC CG | | |
| Resistance gene: | mecA | | |
| 1231 | 5′-GCG AGC CCG AAG ATA AAA AAG AAC CTC TGC | 1178^{b} | 1291-1315 |
| | TGC TCG C | | |
| Resistance gene: | parC | | |
| 1938^{b} | 5′-CCG CGC ACC ATT GCT TCG TAC ACT GAG GAG | 1321^{c} | 232-260 |
| | TCT CCG CGC GG | | |
| 1939 | 5′-CGA CCC GGA TGG TAG TAT CGA TAA TGA TCC | 1321^{c} | 317-346 |
| | GCC AGC GGC CGG GTC G | | |
| 1955^{b} | 5′-CGC GCA ACC ATT GCT TCG TAC ACT GAG GAG | 1321^{c} | 235-260 |
| | TCT GCG CG | | |
| Resistance gene: | vanA | | |
| 1239 | 5′-GCG AGC GCA GAC CTT TCA GCA GAG GAG GCT | 1051 | 860-880 |
| | CGC | | |
| 1240 | 5′-GCG AGC CGG CAA GAC AAT ATG ACA GCA AAA | 1051 | 663-688 |
| | TCG CTC GC | | |
| Resistance gene: | vanE | | |
| 1241 | 5′-GCG AGC GGG GAA CGA GGA TGA TTT GAT TGG | 1117 | 555-577 |
| | CTC GC | | |
| Resistance gene: | vanD | | |
| 1593 | 5′-CCG AGC GAT TTA CCG GAT ACT TGG CTG ICG | 1594 | 835-845 |
| | CTC GG | | |

^{a}Underlined nucleotides indicate the molecular beacon's stem.
^{b}This sequence is from the complementary DNA strand of the sequence of the originating fragment given in the Sequence Listing.
^{c}Sequence from databases.

ANNEX XLVI

Molecular beacon internal hybridization probe for specific
detection of S. aureus gene sequences of unknown coding potential.

Originating DNA fragment

| | | | Nucleotide |
|---|---|---|---|
| SEQ ID NO. | Nucleotide sequence^{a} | SEQ ID NO. | position |
| Bacterial species: | S. aureus | | |
| 1232 | 5′-GGA GCC GCG CGA TTT TAT AAA TGA ATG TTG | 1244 | 53-80 |
| | ATA ACC GGC TCC | | |

^{a}Underlined nucleotides indicate the molecular beacon's stem.

ANNEX XLVII

Molecular beacon internal hybridization probes
for specific detection of tuf sequences.

Originating DNA fragment

| | | | |
|---|---|---|---|
| | | SEQ ID | Nucleotide |
| SEQ ID NO. | Nucleotide sequence^{a} | NO. | position |

| | | | |
|---|---|---|---|
| Bacterial species: | Chlamydia pneumoniae | | |
| 2091 | 5′-CGC GAC TTG AGA TGG AAC TTA GTG AGC | 20 | 157-183 |
| | TTC TTG GTC GCG | | |
| 2092 | 5′-CGC GAC GAA AGA ACT TCC TGA AGG TCG | 20 | 491-516 |
| | TGC AGG TCC AG | | |
| Bacterial species: | Chlamydia trachomatis | | |
| 2213 | 5′-CGT GCC ATT GAC ATG ATT TCC GAA GAA | 1739^{b} | 412-441 |
| | GAC GCT GAA GGC ACG | | |
| Bacterial species: | Enterococcus faecalis | | |
| 1236 | 5′-GCG AGC CGT GGT GAA GTT CGC GTT GGT | 883 | 370-391 |
| | GGC TCG C | | |
| Bacterial species: | Enterococcus faecium | | |
| 1235 | 5′-GCG AGC CGA AGT TGA AGT TGT TGG TAT | 64 | 412-437 |
| | TGC TGG CTC GC | | |
| Bacterial species: | Legionella pneumophila | | |
| 2084^{c} | 5′-CAC GCG TCA ACA CCC GTA CAA GTC GTC | 112 | 461-486 |
| | TTT TGC GCG TG | | |
| Bacterial species: | Mycoplasma pneumoniae | | |
| 2096^{c} | 5′-CGC GAC CGG TAC CAC GGC CAG TAA TCG | 2097^{b} | 658-679 |
| | TGT CGC G | | |
| Bacterial species: | Neisseria gonorrhoeae | | |
| 2177 | 5′-GGC ACG GAC AAA CCA TTC CTG CTG CCT | 126 | 323-357 |
| | ATC GAA ACG TGT TCC CGT GCC | | |
| 2178 | 5′-GGC ACG ACA AAC CAT TCC TGC TGC CTA | 126 | 323-348 |
| | TCG AAC GTG CC | | |
| 2179 | 5′-GGC AGC TCT ACT TCC GTA CCA CTG ACG | 126 | 692-718 |
| | TAA CCG GCT GCC | | |

^{a} Underlined nucleotides indicate the molecular beacon's stem.
^{b} Sequence from databases.
^{c} This sequence is from the complementary DNA strand of the sequence of the originating
fragment given in the Sequence Listing.

| | | | |
|---|---|---|---|
| Bacterial species: | Pseudomonas aeruginosa | | |
| 2122 | 5′-CCG AGC GAA TGT AGG AGT CCA GGG TCT | 153, 880, 2138^{b,c} | 280-302^{d} |
| | CTG CTC GG | | |
| Bacterial species: | Staphylococcus aureus | | |
| 2186 | 5′-ACG CGC TCA AAG CAG AAG TAT ACG TAT | 1728 | 615-646 |
| | TAT CAA AAG ACG CGC GT | | |
| Bacterial group: | Staphylococcus sp. other than S. aureus | | |
| 1233 | 5′-GCG AGC GTT ACT GGT GTA GAA ATG TTC8 | 78 | 372-394 |
| | CGG CTC GC | | |
| Fungal species: | Candida albicans | | |
| 2073 | 5′-CCG AGC AAC ATG ATT GAA CCA TCC ACC | 408 | 404-429 |
| | AAC TGG CTC GG | | |
| Fungal species: | Candida dubliniensis | | |
| 2074 | 5′-CCG AGC AAC ATG ATT GAA GCT TCC ACC | 414 | 416-441 |
| | AAC TGG CTC GG | | |
| Fungal species: | Candida glabrata | | |
| 2110^{b} | 5′-GCG GGC CCT TAA CGA TTT CAG CGA ATC | 417 | 307-335 |
| | TGG ATT CAG CCC GC | | |
| 2111 | 5′-GCG GGC ATG TTG AAG CCA CCA CCA ACG | 417 | 419-447 |
| | CTT CCT GGC CCG C | | |
| Fungal species: | Candida krusei | | |
| 2112^{b} | 5′-GCG GGC TTG ATG AAG TTT GGG TTT CCT | 422 | 318-347 |
| | TGA CAA TTG CCC GC | | |
| 2113 | 5′-GCG GGC ACA AGG GTT GGA CTA AGG AAA | 422 | 419-447 |
| | CCA AGG CAG CCC GC | | |
| 2114 | 5′-GCG GGC ATC GAT GCT ATT GAA CCA CCT | 422 | 505-533 |
| | GTC AGA CCG CCC GC | | |

^{a} Underlined nucleotides indicate the molecular beacon's stem.
^{b} Sequence from databases.
^{c} These sequences were aligned to derive the corresponding primer.
^{d} The nucleotide positions refer to the P. aeruginosa tuf sequence fragment
(SEQ ID NO. 153)

| | | | |
|---|---|---|---|
| Fungal species: | Candida lustaniae | | |
| 2115^{b} | 5′-GCG GGC GGT AAG TCC ACC GGT AAG ACC | 424 | 304-330 |
| | TTG TTG GCC CGC | | |
| 2116 | 5′-GCG GGC GTA AGT CAC CGG TAA GAC CTT | 424 | 476-502 |
| | GTT GGC CCG C | | |
| 2117 | 5′-GCG GGC GAC GCC ATT GAG CCA CCT TCG | 424 | 512-535 |
| | AGA GCC CGC | | |
| Fungal species: | Candida parapsilosis | | |
| 2118^{b} | 5′-GCG GGC TCC TTG ACA ATT TCT TCG TAT | 426 | 301-330 |
| | CTG TTC TTG GCC CGC | | |
| Fungal species: | Candida tropicalis | | |
| 2119 | 5′-GCG GGC TTA CAA CCC TAA GGC TGT TCC | 429 | 357-384 |
| | ATT CGT TGC CCG C | | |
| 2120 | 5′-GCG GGC AGA AAC CAA GGC TGG TAA GGT | 429 | 459-487 |
| | TAC CGG AGC CCG C | | |
| Fungal species: | Cryptococcus neoformans | | |
| 2106 | 5′-GCG AGC AGA GCA CGC CCT CCT CGC CGC | 623, 1985, 1986^{c} | 226-244^{d} |
| | TCG C | | |
| 2107 | 5′-GCG AGC TCC CCA TCT CTG GTT GGC ACG | 623, 1985, 1986^{c} | 390-408^{d} |
| | CTC GC | | |
| Bacterial genus: | Legianella sp. | | |
| 2083 | 5′-CCG CCG ATG TTC CGT AAA TTA CTT GAI | 111-112^{d} | 488-519^{e} |
| | GAA GGT CGA GCC GGC GG | | |

^{a} Underlined nucleotides indicate the molecular beacon's stem.
^{b} This sequence is from the complementary DNA strand of the sequence of the
originating fragment given in the Sequence Listing.
^{c} These sequences were aligned to derive the corresponding primer.
^{d} The nucleotide positions refer to the C. neoformans tuf (EF-1) sequence
fragment (SEQ ID NO. 623)
^{e} The nucleotide positions refer to the L. pneumophila tuf (EF-1) sequence
fragment (SEQ ID NO. 112)

| | | | |
|---|---|---|---|
| Fungal genus: | Candida sp. | | |
| 2108 | 5′-GCG GGC AAC TTC RTC AAG AAG GTT GGT | 414, 417, 422, | 52-80^{c} |
| | TAC AAC CCG CCC GC | 424, 426, 429, 624^{b} | |
| 2109 | 5′-GCG GGC CCA ATC TCT GGT TGG AAY GGT | Same as | 100-125^{c} |
| | GAC AAG CCC GC | SEQ ID NO. 2108 | |
| Bacterial group: | Pseudomonads | | |
| 2121 | 5′-CGA CCG CIA GCC GCA CAC CAA GTT CCG | 153-155, 205, | 598-616^{e} |
| | GTC G | 880, 2137^{d,} 2138^{d,b} | |

^{a}Underlined nucleotides indicate the molecular beacon's stem.
^{b}These sequences were aligned to derive the corresponding primer.
^{c}The nucleotide positions refer to the C. albicans tuf (EF-1) sequence fragment (SEQ ID NO. 624).
^{d}Sequence from databases.
^{e}The nucleotide positions refer to the P. aeruginosa tuf sequence fragment (SEQ ID NO. 153).

ANNEX XLVIII

Molecular beacon internal hybridization probes for
specific detection of ddl and intl gene sequences.

Originating DNA fragment

| | | | Nucleotide |
|---|---|---|---|
| SEQ ID NO. | Nucleotide sequence^{a} | SEQ ID NO. | position |
| Bacterial species: | E. faecium (ddl) | | |
| 1237 | 5′-GCG AGC CGC GAA ATC GAA GTT GCT GTA | 1242^{b} | 334-359 |
| | TTA GGG CTC GC | | |
| Bacterial species: | E. faecalis (mtl) | | |
| 1238 | 5′-GCG AGC GGC GTT AAT TTT GGC ACC GAA | 1243^{b} | 631-656 |
| | GAA GAG CTC GC | | |

^{a}Underlined nucleotides indicate the molecular beacon's stem.
^{b}Sequence from databases.

ANNEX XLIX

Internal hybridization probe for specific detection
of S. aureus sequences of unknown coding potential.

Originating DNA fragment

| | Nucleotide | | |
|---|---|---|---|
| SEQ ID NO. | Nucleotide sequence | SEQ ID NO. | position |
| Bacterial species: | Staphylococcus aureus | | |
| 1234 | 5′-ACT AAA TAA ACG CTC ATT CG | 1244 | 35-54 |

ANNEX L

Specific and ubiquitous primers for nucleic acid amplification
(antimicrobial agents resistance genes sequences).

Originating DNA fragment

| | | | Nucleotide |
|---|---|---|---|
| SEQ ID NO. | Nucleotide sequence | SEQ ID NO. | position |
| Resistance gene: | aac(2′)-Ia | | |
| 1344 | 5′-AGC AGC AAC GAT GTT ACG CAG CAG | 1348^{a} | 163-186 |
| 1345^{b} | 5′-CCC GCC GAG CAT TTC AAC TAT TG | 1348^{a} | 392-414 |
| 1346 | 5′-GAT GTT ACG CAG CAG GGC AGT C | 1348^{a} | 172-193 |
| 1347^{b} | 5′-ACC AAG CAG GTT CGC AGT CAA GTA | 1348^{a} | 467-490 |
| Resistance gene: | aac(3′)-Ib | | |
| 1349 | 5′-CAG CCG ACC AAT GAG TAT CTT GCC | 1351^{a} | 178-201 |
| 1350^{b} | 5′-TAA TCA GGGCAG TTG CGA CTC CTA | 1351^{a} | 356-379 |
| Resistance gene: | aac(3′)-IIb | | |
| 1352 | 5′-CCA CGC TGA CAG AGC CGC ACC G | 1356^{a} | 383-404 |
| 1353^{b} | 5′-GGC CAG CTC CCA TCG GAC CCT G | 1356^{a} | 585-606 |
| 1354 | 5′-CAC GCT GAC AGA GCC GCA CCG | 1356^{a} | 384-404 |
| 1355^{b} | 5′-ATG CCG TTG CTG TCG AAA TCC TCG | 1356^{a} | 606-629 |
| Resistance gene: | aac(3′)-IVa | | |
| 1357 | 5′-GCC CAT CCA TTT GCC TTT GC | 1361^{a} | 295-314 |
| 1358^{b} | 5′-GCG TAC CAA CTT GCC ATC CTG AAG | 1361^{a} | 517-540 |
| 1359 | 5′-TGC CCC TGC CAC CTC ACT C | 1361^{a} | 356-374 |
| 1360^{b} | 5′-CGT ACC AAC TTG CCA TCC TGA AGA | 1361^{a} | 516-539 |
| Resistance gene: | aac(3′)VIa | | |
| 1362 | 5′-CGC CGC CAT CGC CCA AAG CTG G | 1366^{a} | 285-306 |
| 1363^{b} | 5′-CGG CAT AAT GGA GCG CGG TGA CTG | 1366^{a} | 551-574 |
| 1364 | 5′TTT CTC GCC CAC GCA GGA AAA ATC | 1366^{a} | 502-525 |
| 1365^{b} | 5′-CAT CCT CGA CGA ATA TGC CGC G | 1366^{a} | 681-702 |
| Resistance gene: | aac(6′)-Ia | | |
| 1367 | 5′-CAA ATA TAC TAA CAG AAG CGT TCA | 1371^{a} | 56-79 |
| 1368^{b} | 5′-AGG ATC TTG CCA ATA CCT TTA T | 1371^{a} | 269-290 |
| 1379 | 5′-AAA CCT TTG TTT CGG TCT GCT AAT | 1371^{a} | 153-176 |
| 1380^{b} | 5′-AAG CGA TTC CAA TAA TAC CTT GCT | 1371^{a} | 320-343 |
| Resistance gene: | aac(6′)-Ic | | |
| 1372 | 5′-GCT TTC GTT GCC TTT GCC GAG GTC | 1376^{a} | 157-180 |
| 1373^{b} | 5′-CAC CCC TGT TGC TTC GCC CAC TC | 1376^{a} | 304-326 |
| 1374 | 5′-AGA TAT TGG CTT CGC CGC ACC ACA | 1376^{a} | 104-127 |
| 1375^{b} | 5′-CCC TGT TGC TTC GCC CAC TCC TG | 1376^{a} | 301-323 |
| Resistance gene: | ant(3′)-Ia | | |
| 1377 | 5′-GCC GTG GGT CGA TGT TTG ATG TTA | 1381^{a} | 100-123 |
| 1378^{b} | 5′-GCT CGA TGA CGC CAA CTA CCT CTG | 1381^{a} | 221-244 |
| 1379 | 5′-AGC AGC AAC GAT GTT ACG CAG CAG | 1381^{a} | 127-150 |
| 1380^{b} | 5′-CGC TCG ATG ACG CCA ACT ACC TCT | 1381^{a} | 222-245 |
| Resistance gene: | ant(4′)-Ia | | |
| 1382 | 5′-TAG ATA TGA TAG GCG GTA AAA AGC | 1386^{a} | 149-172 |
| 1383^{b} | 5′-CCC AAA TTC GAG TAA GAG GTA TT | 1386^{a} | 386-408 |
| 1384 | 5′-GAT ATG ATA GGC GGT AAA AAG C | 1386^{a} | 151-172 |
| 1385^{b} | 5′-TCC CAA ATT CGA GTA AGA GGT A | 1386^{a} | 388-409 |
| Resistance gene: | aph(3′)-Ia | | |
| 1387 | 5′-TTA TGC CTC TTC CGA CCA TCA AGC | 1391^{a} | 233-256 |
| 1338^{b} | 5′-TAC GCT CGT CAT CAA AAT CAC TCG | 1391^{a} | 488-511 |
| 1389 | 5′-GAA TAA CGG TTT GGT TGA TGC GAG | 1391^{a} | 468-491 |
| 1390^{b} | 5′-ATG GCA AGA TCC TGG TAT CGG TCT | 1391^{a} | 669-692 |
| Resistance gene: | aph(3′)-IIa | | |
| 1392 | 5′-TGG GTG GAG AGG CTA TTC GGC TAT | 1396^{a} | 43-66 |
| 1393^{b} | 5′-CAG TCC CTT CCC GCT TCA GTG AC | 1396^{a} | 250-272 |
| 1394 | 5′-GAC GTT GTC ACT GAA GCG GGA AGG | 1396^{a} | 244-267 |
| 1395^{b} | 5′-CTT GGT GGT CGA ATG GGC AGG TAG | 1396^{a} | 386-409 |
| Resistance gene: | aph(3′)-IIIa | | |
| 1397 | 5′-GTG GGA GAA AAT GAA AAC CTA T | 1401^{a} | 103-124 |
| 1398^{b} | 5′-ATG GAG TGA AAG AGC CTG AT | 1401^{a} | 355-374 |
| 1399 | 5′-ACC TAT GAT GTG GAA CGG GAA AAG | 1401^{a} | 160-183 |
| 1400^{b} | 5′-CGA TGG AGT GAA AGA GCC TGA TG | 1401^{a} | 354-376 |
| Resistance gene: | aph(3′)VIa | | |
| 1402 | 5′-TAT TCA ACA ATT TAT CGG AAA CAG | 1406^{a} | 18-41 |
| 1403^{b} | 5′-TCA GAG AGC CAA CTC AAC ATT TT | 1406^{a} | 175-197 |
| 1404 | 5′-AAA CAG CGT TTT AGA GCC AAA TAA | 1406^{a} | 36-59 |
| 1405^{b} | 5′-TTC TCA GAG AGC CAA CTC AAC ATT | 1406^{a} | 177-200 |
| Resistance gene: | blaCARB | | |
| 1407 | 5′-CCC TGT AAT.AGA AAA GCA AGT AGG | 1411^{a} | 351-374 |
| 1408^{b} | 5′-TTG TCG TAT CCC TCA AAT CAC C | 1411^{a} | 556-577 |
| 1409 | 5′-TGG GAT TAC AAT GGC AAT CAG CG | 1411^{a} | 205-227 |
| 1410^{b} | 5′-GGG GAA TAG GTC ACA AGA TCT GCT T | 1411^{a} | 329-353 |
| Resistance gene: | blaCMY2 | | |
| 1412 | 5′-GAG AAA ACG CTC CAG CAG GGC | 1416^{a} | 793-813 |
| 1413^{b} | 5′-CAT GAG GCT TTC ACT GCG GGG | 1416^{a} | 975-995 |
| 1414 | 5′-TAT CGT TAA TCG CAC CAT CAC | 1416^{a} | 90-110 |
| 1415^{b} | 5′-ATG CAG TAA TGC GGC TTT ATC | 1416^{a} | 439-459 |
| Resistance genes: | blaCTX-M-1, blaCTX-M-2 | | |
| 1417 | 5′-TGG TTA ACT AYA ATC CSA TTG CGG A | 1423^{a} | 314-338 |
| 1418^{b} | 5′-ATG CTT TAC CCA GCG TCA GAT T | 1423^{a} | 583-604 |
| Resistance gene: | blaCTX-M-1 | | |
| 1419 | 5′-CGA TGA ATA AGC TGA TTT CTC ACG | 1423^{a} | 410-433 |
| 1420^{b} | 5′-TGC TTT ACC CAG CGT CAG ATT ACG | 1423^{a} | 580-603 |
| 1421 | 5′-AAT TAG AGC GGC AGT CGG GAG GAA | 1423^{a} | 116-139 |
| 1422^{b} | 5′-GAA ATC AGC TTA TTC ATC GCC ACG | 1423^{a} | 405-428 |
| Resistance gene: | blaCTX-M-2 | | |
| 1424 | 5′-GTT AAC GGT GAT GGC GAC GCT AC | 1428^{a} | 30-52 |
| 1425^{b} | 5′-GAA TTA TCG GCG GTG TTA ATC AGC | 1428^{a} | 153-176 |
| 1426 | 5′-CAC GCT CAA TAC CGC CAT TCC A | 1428^{a} | 510-531 |
| 1427^{b} | 5′-TTA TCG CCC ACT ACC CAT GAT TTC | 1428^{a} | 687-710 |
| Resistance gene: | blaIMP | | |
| 1429 | 5′-TTT ACG GCT AAA GAT ACT GAA AAG T | 1433^{a} | 205-229 |
| 1430^{b} | 5′-GTT TAA TAA AAC AAC CAC CGA ATA AT | 1433^{a} | 513-538 |
| 1431 | 5′-TAA TTG ACA CTC CAT TTA CGG CTA A | 1433^{a} | 191-215 |
| 1432^{b} | 5′-ACC GAA TAA TAT TTT CCT TTC AGG CA | 1433^{a} | 497-522 |
| Resistance gene: | blaOXA2 | | |
| 1434 | 5′-CAC AAT CAA GAC CAA GAT TTG CGA T | 1438^{a} | 319-343 |
| 1435^{b} | 5′-GAA AGG GCA GCT CGT TAC GAT AGA G | 1438^{a} | 532-556 |
| Resistance gene: | blaOXA10 | | |
| 1436 | 5′-CAG CAT CAA CAT TTA AGA TCC CCA | 1439^{a} | 194-217 |
| 1437^{b} | 5′-CTC CAC TTG ATT AAC TGC GGA AAT TC | 1439^{a} | 479-504 |
| Resistance gene: | blaPER-1 | | |
| 1440 | 5′-AGA CCG TTA TCG TAA ACA GGG CTA AG | 1442^{a} | 281-306 |
| 1441^{b} | 5′-TTT TTT GCT CAA ACT TTT TCA GOA TC | 1442^{a} | 579-604 |
| Resistance gene: | blaPE.R2 | | |
| 1443 | 5′-CTT CTG CTC TGC TGA TGC TTG GC | 1445^{a} | 32-54 |
| 1444^{b} | 5′-GGC GAC CAG GTA TTT TGT AAT ACT GC | 1445^{a} | 304-329 |
| Resistance genes: | blaPER1, blaPER2 | | |
| 1446 | 5′-GGC CTG YGA TTT GTT ATT TGA ACT GGT | 1442^{a} | 414-440 |
| 1447^{b} | 5′-CGC TST GGT CCT GTG GTG GTT TC | 1442^{a} | 652-674 |
| 1448 | 5′-GAT CAG GTG CAR TAT CAA AAC TGG AC | 1442^{a} | 532-557 |
| 1449^{b} | 5′-AGC WGG TAA CAA YCC TTT TAA CCG CT | 1442^{a} | 671-696 |
| Resistance gene: | blaSHV | | |
| 1883 | 5′-AGC CGC TTG AGC AAA TTA AAC TA | 1900^{a} | 71-93 |
| 1884^{b} | 5′-GTA TCC CGC AGA TAA ATC ACC AC | 1900^{a} | 763-785 |
| 1885 | 5′-AGC GAA AAA CAC CTT GCC GAC | 1900^{a} | 313-333 |
| 1884^{b} | 5′-GTA TCC CGC AGA TAA ATC ACC AC | 1900^{a} | 763-785 |
| Resistance gene: | blaTEM | | |
| 1906 | 5′-CCT TAT TCC CTT TTT TGC GG | 1927^{a} | 27-46 |
| 1907^{b} | 5′-CAC CTA TCT CAG CGA TCT GTC T | 1927^{a} | 817-838 |
| 1908 | 5′-AAC AGC GGT AAG ATC CTT GAG AG | 1927^{a} | 148-170 |
| 1907^{b} | 5′-CAC CTA TCT CAG CGA TCT GTC T | 1927^{a} | 817-838 |
| Resistance gene: | catI | | |
| 2145 | 5′-GCA AGA TGT GGC GTG TTA CGG T | 2147^{a} | 363-384 |
| 2146^{b} | 5′-GGG GCG AAG AAG TTG TCC ATA TT | 2147^{a} | 484-506 |
| Resistance gene: | catII | | |
| 2148 | 5′-CAG ATT AAA TGC GGA TTC AGC C | 2150^{a} | 67-88 |
| 2149^{b} | 5′-ATC AGG TAA ATC ATC AGC GGA TA | 2150^{a} | 151-173 |
| Resistance gene: | catIII | | |
| 2151 | 5′-ATA TTT CAG CAT TAC CTT GGG TT | 2153^{a} | 419-441 |
| 2152^{b} | 5′-TAC ACA ACT CTT GTA GCC GAT TA | 2153^{a} | 603-625 |
| Resistance gene: | catP | | |
| 2154 | 5′-CGC CAT TCA GAG TTT AGG AC | 2156^{a} | 178-197 |
| 2155^{b} | 5′-TTC CAT ACC GTT GCG TAT CAC TT | 2156^{a} | 339-361 |
| Resistance gene: | cat | | |
| 2157 | 5′-CCA CAG AAA TTG ATA TTA GTG TTT TAT | 2159^{a} | 89-115 |
| 2158^{b} | 5′-TCG CTA TTG TAA CCA GTT CTA | 2159^{a} | 201-221 |
| 2160 | 5′-TTT TGA ACA CTA TTT TAA CCA GC | 2162^{a} | 48-70 |
| 2161^{b} | 5′-GAT TTA ACT TAT CCC AAT AAC CT | 2162^{a} | 231-253 |
| Resistance gene: | dfrA | | |
| 1450 | 5′-ACC ACT GGG AAT ACA CTT GTA ATG GC | 1452^{a} | 106-131 |
| 1451^{b} | 5′-ATC TAC CTG GTC AAT CAT TGC TTC GT | 1452^{a} | 296-321 |
| Resistance gene: | dhfrIa | | |
| 1457 | 5′-CAA AGG TGA ACA GCT CCT GTT T | 1461^{a} | 75-96 |
| 1458^{b} | 5′-TCC GTT ATT TTC TTT AGG TTG GTT AAA | 1461^{a} | 249-275 |
| 1459 | 5′-AAG GTG AAC AGC TCC TGT TT | 1461^{a} | 77-96 |
| 1560^{b} | 5′-GAT CAC TAC GTT CTC ATT GTC A | 1461^{a} | 207-228 |
| Resistance genes: | dhfrIa, dhfrXV | | |
| 1453 | 5′-ATC GAA GAA TGG AGT TAT CGG RAA TG | 1461^{a} | 27-52 |
| 1454^{b} | 5′-CCT AAA AYT RCT GGG GAT TTC WGG A | 1461^{a} | 384-408 |
| 1455 | 5′-CAG GTG GTG GGG AGA TAT ACA AAA | 1461^{a} | 290-313 |
| 1456^{b} | 5t-TAT GTT AGA SRC GAA GTC TTG GKT AA | 1461^{a} | 416-441 |
| Resistance gene: | dbfrIb | | |
| 1466 | 5′-AAG CAT TGA CCT ACA ATC AGT GT | 1470^{a} | 98-120 |
| 1467^{b} | 5′AAT ACA ACT ACA TTG TCA TCA TTT GAT | 1470^{a} | 204-230 |
| 1468 | 5′-CGT TAC CCG CTC AGG TTG GAC ATC AA | 1470^{a} | 183-208 |
| 1469^{b} | 5′-CAT CCC CCT CTG GCT CGA TGT CG | 1470^{a} | 354-376 |
| Resistance gene: | dbfrV | | |
| 1471 | 5′-GAT AAT GAC AAC GTA ATA GTA TTC CC | 1475^{a} | 208-233 |
| 1472^{b} | 5′-GCT CAA TAT CAA TCG TCG ATA TA | 1475^{a} | 342-364 |
| 1473 | 5′-TTA AAG CCT TGA CGT ACA ACC AGT GG | 1475^{a} | 95-120 |
| 1474^{b} | 5′-TGG GCA ATG TTT CTC TGT AAA TCT CC | 1475^{a} | 300-325 |
| Resistance genes: | dhfrIb, dhfrV | | |
| 1462 | 5′-GCA CTC CCY AAT AGG AAA TAC GC | 1470^{a} | 157-179 |
| 1463^{b} | 5′-AGT GTT GCT CAA AAA CAA CTT CG | 1470^{a} | 405-427 |
| 1464 | 5′-ACG TTY GAA TCT ATG GGM GCA CT | 1470^{a} | 139-161 |
| 1465^{b} | 5′-GTC GAT AAG TGG AGC GTA GAG GC | 1470^{a} | 328-350 |
| Resistance gene: | dhfrVI | | |
| 1476 | 5′-GGC GAG CAG CTC CTA TTC AAA G | 1480^{a} | 79-100 |
| 1477^{b} | 5′-TAG GTA AGC TAA TGC CGA TTC AAC A | 1480^{a} | 237-261 |
| 1478 | 5′-GAG AAT GGA GTA ATT GGC TCT GGA TT | 1480^{a} | 31-56 |
| 1479^{b} | 5′-GCG AAA TAC ACAACA TCA GGG TCA T | 1480^{a} | 209-233 |
| Resistance gene: | dhfrVII | | |
| 1485 | 5′-AAA ATG GCG TAA TCG GTA ATG GC | 1489^{a} | 32-54 |
| 1486^{b} | 5′-CAT TTG AGC TTG AAA TTC CTT TCC TC | 1489^{a} | 189-214 |
| 1487 | 5′-AAT CGA AAA TAT GCA GTA GTG TCG AG | 1489^{a} | 166-191 |
| 1488^{b} | 5′-AGA CTA TTG TAG ATT TGA CCG CCA | 1489^{a} | 294-317 |
| Resistance genes: | dhfrVII, dhfrXVII | | |
| 1481 | 5′-RTT ACA GAT CAT KTA TAT GTC TCT | 1489^{a} | 268-291 |
| 1482^{b} | 5′-TAA TTT ATA TTA GAC AWA AAA AAC TG | 1489^{a} | 421-446 |
| 1483 | 5-CAR YGT CAG AAA ATG GCG TAA TC | 1489^{a} | 23-45 |
| 1484^{b} | 5′-TKC AAA GCR WTT TCT ATT GAA GGA AA | 1489^{a} | 229-254 |
| Resistance gene: | dhfrVIII | | |
| 1490 | 5′-GAC CTA TGA GAG CTT GCC CGT CAA A | 1494^{a} | 144-168 |
| 1491^{b} | 5′-TCG CCT TCG TAC AGT CGC TTA ACA AA | 1494^{a} | 376-401 |
| 1492 | 5′-CAT TTT AGC TGC CAC CGC CAA TGG TT | 1494^{a} | 18-43 |
| 1493^{b} | 5′-GCG TCG CTG ACG TTG TTC ACG AAG A | 1494^{a} | 245-269 |
| Resistance gene: | dbfrIX | | |
| 1495 | 5′-TCT CTA AAC ATG ATT GTC GCT GTC | 1499^{a} | 7-30 |
| 1496^{b} | 5′-CAG TGA GGC AAA AGT TTT TCT ACC | 1499^{a} | 133-156 |
| 1497 | 5′-CGG ACG ACT TCA TGT GGT AGT CAG T | 1499^{a} | 171-195 |
| 1498^{b} | 5′-TTT GTT TTC AGT AAT GGT CGG GAC CT | 1499^{a} | 446-471 |
| Resistance gene: | dhfrXII | | |
| 1500 | 5′-ATG GGG TTA TTG GCA ATG GTG CTA | 1504^{a} | 50-73 |
| 1501^{b} | 5′-GCG GTA GTT AGC TTG GGG TGA GAT T | 1504^{a} | 201-225 |
| 1502 | 5′-GGG GGC GGA GCT GAG ATA TAC A | 1504^{a} | 304-325 |
| 1503^{b} | 5′-AAC GGA GTG GGT GTA CGG AAT TAG AG | 1504^{a} | 452-477 |
| Resistance gene: | dhfzXIII | | |
| 1505 | 5′-ATT TTT CGC AGG GTG ACG GAG AGG | 1507^{a} | 106-129 |
| 1506^{b} | 5′-GGG ATG AGA GAA CGT GGA ATT CTG GTG | 1507^{a} | 413-439 |
| Resistance gene: | dbfrXV | | |
| 1508 | 5′-AGA ATG TAT TGG TAT TTG GAT GTA TGG | 1512^{a} | 215-241 |
| 1509^{b} | 5′-GAA TGT GGA TTG TTG AAA TAT GTA AA | 1512^{a} | 336-361 |
| 1510 | 5′-TGG AGT GGC AAA GGG GAA GAA T | 1512^{a} | 67-88 |
| 1511^{b} | 5′-GAG ACA GAA TCA GAT GAT CGG TTA TGG | 1512^{a} | 266-292 |
| Resistance gene: | dhfrXVII | | |
| 1513 | 5′-TTG AAG GTG AAA TGA AAA CGT CC | 1517^{a} | 201-223 |
| 1514^{b} | 5′-GAA ATT GTG AGG GAT TAT AGG GAA T | 1517^{a} | 381-405 |
| 1515 | 5′-GTG GTG AGT AAA AGG TGA GCA AC | 1517^{a} | 66-88 |
| 1516^{b} | 5′-TGT TTG AAA GGA TTT TGT ATT GAA GG | 1517^{a} | 232-257 |
| Resistance gene: | embB | | |
| 2102 | 5′-GAC GTT CAC CGT GAG GGA GG | 2105^{a} | 822-841 |
| 2103^{b} | 5′-CGA ACG AGG GGA AAT AGT TGG AC | 2105^{a} | 948-970 |
| Resistance genes: | ereA, ereA2 | | |
| 1528 | 5′-AAC TTG AGG GAT TTT GGG ATA CCC TG | 1530^{a} | 80-105 |
| 1529^{b} | 5′-TTG CGG ATG AAA TAA CGG CGG ACT | 1530^{a} | 317-340 |
| Resistance gene: | ereB | | |
| 1531 | 5′-TCT TTT TGT TAC GAC ATA CGC TTT T | 1535^{a} | 152-176 |
| 1532^{b} | 5′-AGT GCT TCT TTA TCC GCT GTT CTA | 1535^{a} | 456-479 |
| 1533 | 5′-CAG CGG ATA AAG AAG CAC TAC ACA TT | 1535^{a} | 461-486 |
| 1534^{b} | 5′-CCT CCT GAA ATA AAG CCC GAC AT | 1535^{a} | 727-749 |
| Resistance gene: | gyrA | | |
| 1340 | 5′-GAA CAA GGT ATG ACA CCG GAT AAA T | 1299^{a} | 163-188 |
| 1341^{b} | 5′-GAT AAC TGA AAT CCT GAG CCA TAC G | 1299^{a} | 274-299 |
| 1936 | 5′-TAC CAC CCG CAC GGC | 1954^{a} | 205-219 |
| 1937^{b} | 5′-CGG AGT CGC CGT CGA TG | 1954^{a} | 309-325 |
| 1942 | 5′-GAC TGG AAC AAA GCC TAT AAA AAA TCA | 1954^{a} | 148-174 |
| 1937^{b} | 5′-CGG AGT CGC CGT CGA TG | 1954^{a} | 309-325 |
| 2040 | 5′-TGT GAC CCC AGA CAA ACC C | 2054^{a} | 33-51 |
| 2041^{b} | 5′-GTT GAG CGG CAG CAC TAT CT | 2054^{a} | 207-226 |
| Resistance gene: | inhA | | |
| 2098 | 5′-CTG AGT CAC ACC GAC AAA CGT C | 2101^{a} | 910-931 |
| 2099^{b} | 5′-CCA GGA CTG AAC GGG ATA CGA A | 2101^{a} | 1074-1095 |
| Resistance genes: | linA, linA′ | | |
| 1536 | 5′-AGA TGT ATT AAC TGG AAA ACA ACA A | 1540^{a} | 99-123 |
| 1537^{b} | 5′-CTT TGT AAT TAG TTT CTG AAA ACC A | 1540^{a} | 352-376 |
| 1538 | 5′-TTA GAA GAT ATA GGA TAC AAA ATA GAA G | 1540^{a} | 187-214 |
| 1539^{b} | 5′-GAA TGA AAA AGA AGT TGA GCT T | 1540^{a} | 404-425 |
| Resistance gene: | linB | | |
| 1541 | 5′-TGA TAA TCT TAT ACG TGG GGA ATT T | 1545^{a} | 246-270 |
| 1542^{b} | 5′-ATA ATT TTC TAA TTG CCC TGT TTC AT | 1545^{a} | 359-384 |
| 1543 | 5′-GGG CAA TTA GAA AAT TAT TTA TCA GA | 1545^{a} | 367-392 |
| 1544^{b} | 5′-TTT TAC TCA TGT TTA GCC AAT TAT CA | 1545^{a} | 579-604 |
| Resistance gene: | mefA | | |
| 1546 | 5′-CAA GAA GGA ATG GCT GTA CTA C | 1548^{a} | 625-646 |
| 1547^{b} | 5′-TAA TTC CCA AAT AAC CCT AAT AAT AGA | 1548^{a} | 816-842 |
| Resistance gene: | mefE | | |
| 1549 | 5′-GCT TAT TAT TAG GAA GAT TAG GGG GC | 1551^{a} | 815-840 |
| 1550^{b} | 5′-TAG CAA GTG ACA TGA TAC TTC CGA | 1551^{a} | 1052-1075 |
| Resistance genes: | mefA, mefE | | |
| 1552 | 5′-GGC AAG CAG TAT CAT TAA TCA CTA | 1548^{a} | 50-73 |
| 1553^{b} | 5′-CAA TGC TAC GGA TAA ACA ATA CTA TC | 1548^{a} | 318-343 |
| 1554 | 5′-AGA AAA TTA AGC CTG AAT ATT TAG GAC | 1548^{a} | 1010-1035 |
| 1555^{b} | 5′-TAG TAA AAA CCA ATG ATT TAC ACC G | 1548^{a} | 1119-1143 |
| Resistance genes: | mphA, mphK | | |
| 1556 | 5′-ACT GTA CGC ACT TGC AGC CCG ACA T | 1560^{a} | 33-57 |
| 1557^{b} | 5′-GAA CGG CAG GCG ATT CTT GAG CAT | 1560^{a} | 214-237 |
| 1558 | 5′-GTG GTG GTG CAT GGC GAT CTC T | 1560^{a} | 583-604 |
| 1559^{b} | 5′-GCC GCA GCG AGG TAC TCT TCG TTA | 1560^{a} | 855-878 |
| Resistance gene: | mupA | | |
| 2142 | 5′-GCC TTA ATT TCG GAT AGT GC | 2144^{a} | 1831-1850 |
| 2143^{b} | 5′-GAG AAA GAG CCC AAT TAT CTA ATG T | 2144^{a} | 2002-2026 |
| Resistance gene: | parC | | |
| 1342 | 5′-GAT GTT ATT GGT CAA TAT CAT CCA | 1321^{a} | 205-229 |
| 1343^{b} | 5′AAG AAA CTG TCT CTT TAT TAA TAT CAC GT | 1321^{a} | 396-425 |
| 1934 | 5′-GAA CGC CAG CGC GAA ATT CAA AAA G | 1781 | 67-91 |
| 1935^{b} | 5′-AGC TCG GCA TAC TTC GAC AGG | 1781 | 277-297 |
| 2044 | 5′-ACC GTA AGT CGG CCA AGT CA | 2055^{a} | 176-195 |
| 2045^{b} | 5′-GTT CTT TCT CCG TAT CGT C | 2055^{a} | 436-454 |
| Resistance gene: | ppflo-like | | |
| 2163 | 5′-ACC TTC ATC CTA CCG ATG TGG GTT | 2165^{a} | 922-945 |
| 2164^{b} | 5′-CAA CGA CAC CAG CAC TGC CAT TG | 2165^{a} | 1136-1158 |
| Resistance gene: | rpoB | | |
| 2065 | 5′-CCA GGA CGT GGA GGC GAT CAC A | 2072^{a} | 1218-1239 |
| 2066^{b} | 5′-CAC CGA CAG CGA GCC GAT CAG A | 2072^{a} | 1485-1506 |
| Resistance gene: | satG | | |
| 1581 | 5′-AAT TGG GGA CTA CAC CTA TTA TGA TG | 1585^{a} | 93-118 |
| 1582^{b} | 5′-GGC AAA TCA GTC AGT TCA GGA GT | 1585^{a} | 310-332 |
| 1583 | 5′-CGA TTG GCA ACAATA CAC TCC TG | 1585^{a} | 294-316 |
| 1584^{b} | 5′-TCA CCT ATT TTT ACG CCT GGT AGG AC | 1585^{a} | 388-413 |
| Resistance gene: | sulII | | |
| 1961 | 5′-GCT CAA GGC AGA TGG CAT TCC C | 1965^{a} | 222-243 |
| 1962^{b} | 5′-GGA CAA GGC GGT TGC GTT TGA T | 1965^{a} | 496-517 |
| 1963 | 5′-CAT TCC CGT CTC GCT CGA CAG T | 1965^{a} | 237-258 |
| 1964^{b} | 5-ATC TGC CTG CCC GTC TTG C | 1965^{a} | 393-411 |
| Resistance gene: | tetB | | |
| 1966 | 5′-CAT GCC AGT CTT GCC AAC G | 1970^{a} | 66-84 |
| 1967^{b} | 5′-CAG CAA TAA GTA ATC CAG CGA TG | 1970^{a} | 242-264 |
| 1968 | 5′-GGA GAG ATT TCA CCG CAT AG | 1970^{a} | 457-476 |
| 1969^{b} | 5′-AGC CAA CCA TCA TGC TAT TCC A | 1970^{a} | 721-742 |
| Resistance gene: | tetM | | |
| 1586 | 5′-CCC ACA ATC TTT TTT ATC AAT AA | 1590^{a} | 361-386 |
| 1587^{b} | 5′-CAT TGT TCA GAT TCG GTA AAG TTC | 1590^{a} | 501-524 |
| 1588 | 5′-GTT TTT GAA GTT AAA TAG TGT TCT T | 1590^{a} | 957-981 |
| 1589^{b} | 5′-CTTCCA TTT GTA CTT TCC CTA | 1590^{a} | 1172-1192 |
| Resistance gene: | vatB | | |
| 1609 | 5′-GCC CTG ATC CAA ATA GCA TAT A | 1613^{a} | 11-32 |
| 1610^{b} | 5′-CCT GGC ATA ACA GTA ACA TTC TG | 1613^{a} | 379-401 |
| 1611 | 5′-TGG GAA AAA GCA ACT CCA TCT C | 1613^{a} | 301-322 |
| 1612^{b} | 5′-ACA ACT GAA TTC GCA GCA ACA AT | 1613^{a} | 424-446 |
| Resistance gene: | vatC | | |
| 1614 | 5′-CCA ATC CAG AAG AAA TAT ACC C | 1618^{a} | 26-47 |
| 1615^{b} | 5′-ATT AGT TTA TCC CCA ATC AAT TCA | 1618^{a} | 177-200 |
| 1616 | 5′-ATA ATG AAT GGG GCT AAT CAT CGT AT | 1618^{a} | 241-266 |
| 1617^{b} | 5′-GCC AAC AAC TGA ATA AGG ATC AAC | 1618^{a} | 463-486 |
| Resistance gene: | vga | | |
| 1619 | 5′-AAG GCA AAA TAA AAG GAG CAA AGC | 1623^{a} | 641-664 |
| 1620^{b} | 5′-TGT ACC CGA GAC ATC TTC ACC AC | 1623^{a} | 821-843 |
| 1621 | 5′-AAT TGA AGG ACG GGT ATT GTG GAA AG | 1623^{a} | 843-868 |
| 1622^{b} | 5′-CGA TTT TGA CAG ATG GCG ATA ATG AA | 1623^{a} | 975-1000 |
| Resistance gene: | vgaB | | |
| 1624 | 5′-TTC TTT AAT GCT COT AGA TGA ACC TA | 1628^{a} | |
| 1625^{b} | 5′-TTT TCG TAT TCT TCT TGT TGC TTT C | 1628^{a} | 578-602 |
| 1626 | 5′-AGG AAT GAT TAA GCC CCC TTC AAA AA | 1628^{a} | 663-688 |
| 1627^{b} | 5′-TTA CAT TGC GAC CAT GAA ATT GCT CT | 1628^{a} | 849-874 |
| Resistance genes: | vgb, vgh | | |
| 1629 | 5′-AAG GGG AAA GTT TGG ATT ACA CAA CA | 1633^{a} | 73-98 |
| 1630^{b} | 5-GAA CCA CAG GGC ATT ATC AGA ACC | 1633^{a} | 445-468 |
| 1631 | 5′-CGA CGA TGC TTT ATG GTT TGT | 1633^{a} | 576-596 |
| 1632^{b} | 5′-GTT AAT TTG CCT ATC TTG TCA CAC TC | 1633^{a} | 850-875 |
| Resistance gene: | vgbB | | |
| 1634 | 5′-TTA ACT TGT CTA TTC CCG ATT CAG G | 1882^{a} | 23-47 |
| 1635^{b} | 5′-GCT GTG GCA ATG GAT ATT CTG TA 1882^{a} | 267-289 | |
| 1636 | 5′-TTC CTA CCC CTG ATG CTA AAG TGA | 1882^{a} | 155-178 |
| 1637^{b} | 5′-CAA AGT GCG TTA TCC GAA CCT AA | 1882^{a} | 442-464 |

Sequencing primers

| | | | |
|---|---|---|---|
| Resistance gene: | gyrA | | |
| 1290 | 5′-GAY TAY GCI ATG 151 GTI ATH GT 1299^{a} | 70-83 | |
| 1292^{b} | 5′-ARI SCY TCI ARI ATR TGI GC | 1299^{a} | 1132-1152 |
| 1291 | 5′-GCI YTI CCI GAY GTI MGI GAY GG | 1299^{a} | 100-123 |
| 1292^{b} | 5′-ARI SCY TCI ARI ATR TGI GC | 1299^{a} | 1132-1152 |
| 1293 | 5′-ATG GCT GAA TTA CCT CAA TC | 1299^{a} | 1-21 |
| 1294^{b} | 5′-ATG ATT GTT GTA TAT CTT CTT CAA C | 1299^{a} | 2626-2651 |
| 1295^{b} | 5′-CAG AAA GTT TGA AGC GTT GT | 1299^{a} | 1255-1275 |
| 1296 | 5′-AAC GAT TCG TGA GTC AGA TA | 1299^{a} | 1188-1208 |
| 1297 | 5′-CGG TCA ACA TTG AGG AAG AGC T | 1300^{a} | 29-51 |
| 1298^{b} | 5′-ACG AAA TCG ACC GTC TCT TTT TC | 1300^{a} | 415-437 |
| Resistance gene: | gyrB | | |
| 1301 | 5′-GTI MGI AWl MGI CCI GSI ATG TA | 1307^{a} | 82-105 |
| 1302^{b} | 5′-TAI ADI GGI GGI KKI GCI ATR TA | 1307^{a} | 1600-1623 |
| 1303 | 5′-GGI GAI GAI DYI MGI GAR GG | 1307^{a} | 944-975 |
| 1304^{b} | 5′-CIA RYT TIK YIT TIG TYT G | 1307^{a} | 1024-1043 |
| 1305 | 5′-ATG GTG ACT GCA TTG TCA GAT G | 1307^{a} | 1-23 |
| 1306^{b} | 5′-GTC TAC GGT TTT CTA CAA CGT C | 1307^{a} | 1858-1888 |
| Resistance gene: | parC | | |
| 1308 | 5′-ATG TAY GTI ATI ATG GAY MGI GC | 67-90 | |
| 1309^{b} | 5′-ATI ATY TTR TTI CCY TTI CCY TT | 1993-2016 | |
| 1310 | 5′-ATI ATI TSI ATI ACY TCR TC | 1320^{a} | 1112-1132 |
| 1311^{b} | 5′-GAR ATG AAR ATI MGI GGI GAR CA | 1320^{a} | 1288-1311 |
| 1312 | 5′-AAR TAY ATI ATI CAR GAR MGI GC | 1321^{a} | 67-90 |
| 1313^{b} | 5′-AMI AYI CKR TGI GGI TTI TTY TT | 1321^{a} | 2212-2235 |
| 1314 | 5′-TAI GAl TTY ACI GAl SMI CAR GC | 1321^{a} | 1228-1251 |
| 1315^{b} | 5′-ACI ATI GCI TCI GCY TGI KSY TC | 1321^{a} | 1240-1263 |
| 1316 | 5′-GTG AGT GAA ATA ATT CAA GAT T | 1321^{a} | 1-23 |
| 1317^{b} | 5′-CAC CAA AAT CAT CTG TAT CTA C | 1321^{a} | 2356-2378 |
| 1318 | 5′-ACC TAY TCS ATG TAC GTR ATC ATG GA | 1320^{a} | 58-84 |
| 1319^{b} | 5′-AGR TCG TCI ACC ATC GGY AGY TT | 1320^{a} | 832-855 |
| Resistance gene: | parE | | |
| 1322 | 5′-RTI GAl AAY ISI GTI GAY GAR G | 1328^{a} | 133-155 |
| 1325^{b} | 5′-RTT CAT YTC ICC IAR ICC YTT | 1328^{a} | 1732-1752 |
| 1323 | 5′-ACI AWR SAl GGI GGI ACI CAY G | 1328^{a} | 829-850 |
| 1324^{b} | 5′-CCI CCI GCI SWR TCI CCY TC | 1328^{a} | 1280-1302 |
| 1326 | 5′-TGA TTC AAT ACA GGT TTT AGA G | 1328^{a} | 27-49 |
| 1327^{b} | 5′-CTA GAT TTC CTC CTC ATC AAA T | 1328^{a} | 1971-1993 |

^{a}Sequence from databases.
^{b}These sequences are from the complementary DNA strand of the sequence of the originating fragment given in the Sequence Listing.

ANNEX LI

Internal hybridization probes for specific detection
of antimicrobial agents resistance genes sequences.

Originating DNA fragment

| | | | |
|---|---|---|---|
| | | | Nucleotide |
| SEQ ID NO. | Nucleotide sequence | SEQ ID NO. | position |

| | | | |
|---|---|---|---|
| Resistance gene: | aph3′VIa | | |
| 2252 | 5′-CCA CAT ACA GTG TCT CTC | 1406^{a} | 149-166 |
| Resistance gene: | blaSBV | | |
| 1886 | 5′-GAC GCC CGC GCC ACC ACT | 1900^{a} | 484-501 |
| 1887 | 5′-GAC GCC CGC GAC ACC ACT A | 1899^{a} | 514-532 |
| 1888 | 5′-GAC GCC CGC AAC ACC ACT A | 1901^{a} | 514-532 |
| 1889 | 5′-GTT CGC AAC TGC AGC TGC TG | 1899^{a} | 593-612 |
| 1890 | 5′-TTC GCA ACG GCA GCT GCT G | 1899^{a} | 594-612 |
| 1891 | 5′-CCG GAG CTG CCG AIC GGG | 1902^{a} | 692-709 |
| 1892 | 5′-CGG AGC TGC CAA RCG GGG | 1903^{a} | 693-710 |
| 1893 | 5′-GGA GCT GGC GAR CGG GGT | 1899^{a} | 694-711 |
| 1894 | 5′-GAC CGG AGC TAG CGA RCG | 1904^{a} | 690-707 |
| 1895 | 5′-CGG AGC TAG CAA RCG GGG T | 1899^{a} | 693-711 |
| 1896 | 5′-GAA ACG GAA CTG AAT GAG GCG | 1899^{a} | 484-504 |
| 1897 | 5′-CAT TAC CAT GGG CGA TAA CAG | 1899^{a} | 366-386 |
| 1898 | 5′-CCA TTA CCA TGA GCG ATA ACAG | 1899^{a} | 365-386 |
| Resistance gene: | blaTEM | | |
| 1909 | 5′-ATG ACT TGG TTA AGT ACT CAC C | 1928^{a} | 293-314 |
| 1910 | 5′-ATG ACT TGG TTG AGT ACT CAC C | 1927^{a} | 293-314 |
| 1911 | 5′-CCA TAA CCA TGG GTG ATA ACA C | 1928^{a} | 371-392 |
| 1912 | 5′-CCA TAA CCA TGA GTG ATA ACA C | 1927^{a} | 371-392 |
| 1913 | 5′-CGC CTT GAT CAT TGG GAA CC | 1928^{a} | 475-494 |
| 1914 | 5′-CGC CTT GAT CGT TGG GAA CC | 1927^{a} | 475-494 |
| 1915 | 5′-CGC CTT CAT AGT TGG GAA CC | 1929^{a} | 475-494 |
| 1916 | 5′-CGT GGG TCT TGC GGT ATC AT | 1927^{a} | 712-731 |
| 1917 | 5′-CGT GGG TCT GGC GGT ATC AT | 1930^{a} | 712-731 |
| 1918 | 5′-GTG GGT CTC ACG GTA TCA TTG | 1927^{a} | 713-733 |
| 1919 | 5′-CGT GGG TCT CTC GGT ATC ATT | 1931^{a} | 712-732 |
| 1920 | 5′-CGT GGI TCT CGC GGT ATC AT | 1927^{a} | 712-731 |
| 1921 | 5′-CGT GGG TCT AGC GGT ATC ATT | 1932^{a} | 713-733 |
| 1922 | 5′-GTT TTC CAA TGA TTA GCA CTT TTA | 1927^{a} | 188-211 |
| 1923 | 5′-GTT TTC CAA TGA TAA GCA CTT TTA | 1927^{a} | 188-211 |
| 1924 | 5′-GTT TTC CAA TGC TGA GCA CTT TT | 1932^{a} | 188-210 |
| 1925 | 5′-CGT TTT CCA ATG ATG AGC ACT TT | 1927^{a} | 187-209 |
| 1926 | 5′-GTT TTC CAA TGG TGA GCA CTT TT | 1933^{a} | 188-210 |
| 2006 | 5′-TGG AGC CGG TGA GCG TGG | 1927^{a} | 699-716 |
| 2007 | 5′-TGG AGG GAG TGA GCG TGG | 2010^{a} | 699-716 |
| 2008 | 5′-TGT GGA GCG GAT GAG CGT G | 1929^{a} | 697-715 |
| 2009 | 5′-GTG GAG CGA GTA AGC GTG G | 2011^{a} | 698-716 |
| 2141 | 5′-GAG GAG TGA GAG AAA AGC | 1927^{a} | 311-328 |
| Resistance gene: | dbfrIa | | |
| 2253 | 5′-GAT TAG CGA ACC GAA AGT A | 1461^{a} | 158-176 |
| Resistance gene: | embB | | |
| 2104 | 5′-GTG GGG ATG GGI GGA GTG | 2105^{a} | 910-927 |
| Resistance gene: | gyrA | | |
| 1333 | 5′-TGA TGG TGA GTT ATG TAT TTA TG | 1299^{a} | 240-263 |
| 1334 | 5′-GAT GTA TTT ATA AAG GAA TGG TA | 1299^{a} | 251-274 |
| 1335 | 5′-GTA TTT ATG GAG GAA TGG T | 1299^{a} | 254-273 |
| 1940 | 5′-GTA TGG TTG GTG AGG TAA T | 1299^{a} | 206-224 |
| 1943 | 5′-GGT GGT GGA GGG GGA G | 1954^{a} | 279-294 |
| 1945 | 5′-GGG GGA GTA GGG GGT AT | 1954^{a} | 216-232 |
| 1946 | S′-GGG GGA GTT GGG GGT AT | 1954^{a} | 216-232 |
| 1947 | 5′-GGG TAT AGG GGA GGA TGG T | 1954^{a} | 227-245 |
| 1948 | 5′-GGG GTA TAG AAG AGG ATG G | 1954^{a} | 226-244 |
| 1949 | 5′-GGG TAT AGG GGA GGA TGG T | 1954^{a} | 227-245 |
| 2042 | 5′-GAG GGG GAT TTG TGT ATT TA | 2054^{a} | 103-122 |
| 2043 | 5′-GAG GGG GAT TAG TGT ATT TA | 2054^{a} | 103-122 |
| Resistance gene: | inhA | | |
| 2100 | 5′-GGG AGA GGA TAG GTT GTG | 2101^{a} | 1017-1034 |
| Resistance gene: | parC | | |
| 1336 | 5′-TGG AGA GTA GTG AGT GT | 1321^{a} | 232-249 |
| 1337 | 5-TGG AGA GTT GTG AGT GT | 1321^{a} | 232-249 |
| 1338 | 5′-GTG TAG GGA GGA ATG | 1321^{a} | 245-260 |
| 1339 | 5′-GGA GGG GAA ATG GGT | 1321^{a} | 342-357 |
| 1941 | 5′-GGA ATG GTG GGT TTA AGT | 1321^{a} | 253-270 |
| 1944 | 5′-TTT GGG GGG GAT GGG TTA G | 1781 | 247-265 |
| 1950 | 5′-GGG GAG ATG GGG TGG | 1781 | 137-151 |
| 1951 | 5′-GGG GAG AGA GGG TGG TA | 1781 | 137-153 |
| 1952 | 5′-CCT GCT ATG GAG CGA TGG T | 1781 | 147-165 |
| 1953 | 5′-CGC CTG CTA TAA AGC GAT GGT | 1781 | 145-165 |
| 2046 | 5′-ACG GGG ATT TTT CTA TCT AT | 2055^{a} | 227-246 |
| Resistance gene: | rpoB | | |
| 2067 | 5-AGC TGA GCC AAT TCA TGG | 2072^{a} | 1304-1321 |
| 2068 | 5′-ATT CAT GGA CCA GAA CAA C | 2072^{a} | 1314-1332 |
| 2069 | 5′-CGC TGT CGG GGT TGA CCC | 2072^{a} | 1334-1351 |
| 2070 | 5′-GTT GAC CCA CAA GCG CCG | 2072^{a} | 1344-1361 |
| 2071 | 5-CGA CTG TCG GCG CTG GGG | 2072^{a} | 1360-1377 |
| Resistance gene: | tetM | | |
| 2254 | 5′-ACC TGA ACA GAG AGA AAT G | 1590^{a} | 1062-1080 |

^{a}Sequence from databases.

ANNEX LII

Molecular beacon internal hybridization probes
for specific detection of atpD sequences.

Originating DNA fragment

| | | | |
|---|---|---|---|
| | | SEQ ID | Nucleotide |
| SEQ ID NO. | Nucleotide sequence^{a} | NO. | position |

| | | | |
|---|---|---|---|
| Bacterial species: | Bacteroides fragilis | | |
| 2136 | 5′-CCA ACG CGT CCT CAA TCA TTT CTA ACT TCT | 929 | 353-382 |
| | ATG GCC GGC GTT GG | | |
| Bacterial species: | Bordetella pertussis | | |
| 2182 | 5′-GCG CGC CAA CGA CTT CTA CCA CGA AAT GGA | 1672 | 576-605 |
| | AGA GTC GCG CGC | | |
| Bacterial group: | Campylobacter jejuni and C. coil | | |
| 2133 | 5′-CCA CGC ACA WAA ACT TGT TTT AGA AGT | 1576, 1600, 1849, | 44-73^{d} |
| | AGC AGC WCA GCG TGG | 1863, 2139^{b, c} | |
| Fungal species: | Candida glabrata | | |
| 2078 | 5′-CCG AGC CTT GGT CTT CGG CCA AAT GAA CGC | 463 | 442-463 |
| | TCG G | | |
| Fungal species: | Candida krusei | | |
| 2075 | 5′-CCG AGC CAG GTT CTG AAG TCT CTG CAT TAT | 468 | 720-748 |
| | TAG GTG CTC GG | | |
| Fungal species: | Candida lusitaniae | | |
| 2080 | 5′-CCG AGC CGA AGA GGG CCA AGA TGT CGC TCG | 470 | 520-538 |
| | G | | |
| Fungal species: | Candida parapailosis | | |
| 2079 | 5′-CCG AGC GTT CAG TTA CTT CAG TCC AAG CCG | 472 | 837-860 |
| | GCT CGG | | |
| Fungal species: | Candida tropicalis | | |
| 2077 | 5′-CCG AGC AAC CGA TCC AGC TCC AGC TAC GCT | 475 | 877-897 |
| | CGG | | |
| Bacterial species: | Kiebalella pneumoniae | | |
| 2281 | 5′-CCC CCA GCT GGG CGG CGG TAT CGA TGG GGG | 317 | 40-59 |

^{a} Underlined nucleotides indicate the molecular beacon′s stem.
^{b} Sequence from databases:
^{c} These sequences were aligned to derive the corresponding primer.
^{d} The nucleotide positions refer to the C. jejuni atpD sequence fragment
(SEQ ID NO. 1576)

| | | | |
|---|---|---|---|
| Fungal genus: | Candida sp. | | |
| 2076 | 5′-CCG AGC YGA YAA CAT TTT CAG ATT CAC CCA | 460-478, 663^{b} | 697-723^{c} |
| | RGC GCT CGG | | |

^{a Underlined nucleotides indicate the molecular beacon's stem.}
^{b These sequences were aligned to derive the corresponding primer.}
^{c The nucleotide positions refer to the} C. albicans atpD sequence fragment (SEQ ID NO. 460)

ANNEX LIII

Internal hybridization probes for
specific detection of atpD sequences.

Originating DNA fragment

| | | | Nucleotide |
|---|---|---|---|
| SEQ ID NO. | Nucleotide sequence | SEQ ID NO. | position |
| Bacterial species: | Acinetobacter baumannii | | |
| 2169 | 5′-CCC GTT TGC GAA AGG TGG | 243 | 304-321 |
| Bacterial species: | Klebsiella pneumoniae | | |
| 2167 | 5′-CAG CAG CTG GGC GGC GGT | 317 | 36-53 |

ANNEX LIV

Internal hybridization probes for specific
detection of ddl and intl sequences.

Originating DNA fragment

| | | | Nucleotide |
|---|---|---|---|
| SEQ ID NO. | Nucleotide sequence | SEQ ID NO. | position |
| Bacterial species: | Enterococcus faecium (ddl) | | |
| 2286 | 5′-AGT TGC TGT ATT AGG AAA TG | 2288^{a} | 784-803 |
| 2287 | 5′-TCG AAG TTG CTG TAT TAG GA | 2288^{a} | 780-799 |
| Bacterial species: | Enterococcus faecalis mtl) | | |
| 2289 | 5′-CAC CGA AGA AGA TGA AAA AA | 1243^{a} | 264-283 |
| 2290 | 5′-TGG CAC CGA AGA AGA TGA | 1243^{a} | 261-278 |
| 2291 | 5′-ATT TTG GCA CCG AAG AAG A | 1243^{a} | 257-275 |

^{a}Sequence from databases.

The application's sequence listing, which the Patent Office published only in electronic form, follows.

SEQUENCE LISTING (2297 sequences)

SEQ ID NO: 1 - DNA, 750 bp, Acinetobacter baumannii
  ref <308>: DATABASE ACCESSION NUMBER: ATCC 19606
caaactcgtgagcacatccttctttctcgtcaggtaggtgtaccttacatcatcgtattcttaaacaaatgcgaccttgttgatgacgaagaattacttgaattagtagaaatggaagtacgtgaacttctttctacttatgacttcccaggtgatgacactccagtaatccgtggttcagctcttgcagcgcttaacggtgaagctggtccttacggtgaagaatcagttcttgctcttgtagcagcacttgactcttacatcccagagccagagcgtgcaatcgacaaagcattcttgatgccaatcgaagacgtattctcaatttctggtcgtggtacagtagtaacaggccgtgttgaagctggtatcatcaaagttggtgaagaagtagagatcgttggtattaaagatacagttaaaacaactgtaactggcgtagaaatgttccgtaaacttcttgacgaaggccgtgcaggtgagaactgtggtatcttacttcgtggtactaagcgtgaagaagtacaacgtggtcaagtacttgctaaaccaggtacaatcaagccgcacactaaattcgacgcagaagtatacgtactttctaaagaagaaggtggtcgtcacactccattcttaaatggttaccgtccacagttctacttccgtacaactgacgtaactggtgcratccagttgaaagaaggcgttgaaatggtaatgccaggtgacaacgttgaaatgtcagtagaa

SEQ ID NO: 2 - DNA, 826 bp, Actinomyces meyeri
  ref <308>: DATABASE ACCESSION NUMBER: ATCC 35568
cggtgcgatcctcgtggtcgccgcgaccgacggccccatggcccagacccgcgagcacgtcctgctcgcccgtcaggtcggcgttcccaccatcctcatcgccctcaacaagtccgacatggttgacgacgaggaaatgatggaactggtcgaggaggagtgccgcgacctgctggagtcccaggacttcgatcgcgatgccccgatcgtccaggtttccgctctgaaggccctcgagggcgacgcggagtgggttgccaagatcgaggagctcatggaggctgtggattcctacatccccacccccgagcgcgatatggacaagcccttcctcatgccgatcgaggacgtcttcacgatcacaggtcgtggcacggtcgtcacggggcgtgttgagcgtggcaagctgccgatcaactccgaggtcgagatcctcggtatccgtgatccccagaagaccacggtcaccggcatcgagatgttccacaagtcgatggacgaggcatgggccggcgagaactgtggcctgctgctgcgcggtaccaagcgcgatgaggttgagcgcggccaggttgtggccattcccggctccatcacgcctcacaccgagttcgagggccaggtttacatcctcaagaaggaagagggcggccgtcacaacccgttcttctcgaactaccgtccgcagttctacttccgtaccacggacgtgaccggcgtcatcaccctccccgagggcaccgacatggtcatgcctggcgacaccaccgagatctccgttcagctgatccagcccatcgccatggagcccggctgggcttcgcca

SEQ ID NO: 3 - DNA, 835 bp, Aerococcus viridans
  ref <308>: DATABASE ACCESSION NUMBER: ATCC 11563
tggtgcgatcttagtagtatctgctgctgatggtccaatgccacaaactcgtgagcacatccttttagctggccaaatcggtgttcctgcattcgtagtattcttaaacaaagttgaccaagttgacgatgaagaattactagaattagttgaaatggaagttcgtgacttattatctgagtacaactacccaggtgacgatctacctgtaatcgctggttctgctttattagcattacaaggcgatgaagctcaagaagctaaaatcatggaattaatggaagctgtagactcttacattccagaaccagaacgtgacaacgacaaaccattcatgatgccaattgaggatgtattctcaatcactggtcgtggtactgttgctacaggtcgtgttgaacgtggtgaagttcgtacaggtgacgaagttgacatcgttggtattgctgaacaaatcggtaaatcagttgtaactggtgttgaaatgttccgtaaaaacttagactacgctcaagctggtgacaacatcggtgcattattacgtggtgttcaacgtgaagacatccaacgtggtcaagtattggctgctcctggttcaatcactccacatactaaatttaaagcgcaagtttacgttttatctaaagaagaaggtggacgtcatacaccattcttaactaactaccgtccacaattctacttccgtactactgacattactggtgttatcactttaccagaagacgtagctatggttatgcctggtgacaacgttgatatggacgttgaattgattcacccagttgcgatcgaagatggtactaaattctctatc

SEQ ID NO: 4 - DNA, 827 bp, Achromobacter xylosoxidans subsp. denitrificans
  ref <308>: DATABASE ACCESSION NUMBER: ATCC 15173
cctggtggtgtcggccgctgacggcccgatgccgcaaacgcgcgaacacatcctgctgagccgccaggttggcgtgccgtacatcatcgtcttcctgaacaaggccgacatggttgacgacgccgagctgcttgagctggtggaaatggaagttcgcgarctgctgagcaagtacgacttcccgggcgacgacaccccgatcgtgaagggttcggccaagctggcgctggaaggcgacaagggcgaactgggcgaacaggccatcatggcgctggccgctgcgctggactcgtacatcccgacgcctgagcgtgccgttgacggcgcgttcctgatgccggttgaagacgtgttctcgatctcgggtcgcggcaccgtggtgaccggccgtatcgaacgcggcatcatcaaggtcggcgaggaaatcgaaatcgtcggtctggtgccgacggtgaagacgacctgcacgggcgtggaaatgttccgcaagctgctggaccaaggtcaagccggcgacaacgtgggcatcctrctgcgcggcaccaagcgtgaagacgtccagcgcggccaggttctggccaagccgggctcgatcaccccgcacacggacttcacgtccgaggtgtacatcctgtccaaggaagaaggcggccgtcacactccgttcttccaaggctatcgtccccagttctacttccgcacgacggacgtgacgggcacgatcgagctgccggccgacaaggaaatggtcctgccgggcgacaacgtggccatgacggtcaagctgctggctccgatcgccatggaagaaggcctgcgttcgccac

SEQ ID NO: 5 - DNA, 823 bp, Anaerorhabdus furcosus
  ref <308>: DATABASE ACCESSION NUMBER: ATCC 25662
tggatcaatcctagtagttgctgcaactgatggaccaatgcctcaaactcgtgaacatatcttacttgctcgtcaagtaggtgttccaagaatggttgtattcttgaacaaatgcgacatggttgaagatgaagaattaatcgaccttgttgaaatggaagttcgtgaacttctaagtgcttacggtttcgaaggtgatgatacaccagttatccgtggttctgcattaaaatctcttgaaggaaatgctgattgggaagcaaaagttgctgaattaatggatgcagttgactcttggattccaactccaactcatgaaacagacaaaccattcttaatggctgttgaagatgtattcacaattacaggtcgtggtacagttgctactggacgtgttgaacgtggacacttaaaccttaacgaagaagttgaaatcgttggtattcatgatactaagaaatcagttgttactggtatcgaaatgttccgtaaattattagactatgctgaagcaggagacaacattggtgcattattacgtggtgtttctcgtgatgaaatcgaacgtggacaatgtctagctaaacctggatcagttactccacatacagctttcaaagctcaagtatacgtattaactaaagaagaaggtggacgtcatacaccattcgtaactaactaccgtcctcaattctatttccgtacaactgacgtaacaggagttgttaaacttcctgaaggtactgaaatggttatgcctggagacaacatcgaaatgatcgttgaattaatcgctccaatcgctgttgaacaaggaactaag

SEQ ID NO: 6 - DNA, 825 bp, Bacillus anthracis
  strain 4229
cggcggtatcttagtagtatctgctgctgatggcccaatgcctcaaactcgtgagcacatccttctttctcgtcaagtaggtgtaccttacatcgttgtattcttaaacaaatgcgacatggtagacgacgaagaattattagaattagtagaaatggaagttcgcgacctattatctgaatacggattcccaggcgacgacattcctgtaatcaaaggttctgctcttaaagctcttcaaggagaagctgattgggaagcaaaaatcattgaattaatggctgaagttgatgcttacatcccaactccagaacgtgaaactgacaaaccattcttaatgcctgtagaggacgtattctctatcacaggtcgtggtacagttgctactggtcgtgttgagcgcggtatcgttaaagttggtgacgtagtagaaatcatcggtcttgctgaagaaaatgcttctacaactgtaactggtgtagagatgttccgtaaacttcttgaccaagctcaagctggagacaacatcggtgctttacttcgtggggttgctcgtgaagacatccaacgtggacaagtacttgcaaaaagcggttctgtaaaagctcacgctaaattcaaagctgaagttttcgtattatctaaagaagaaggtggacgtcacactccattcttcgctaactaccgtcctcagttctacttccgtacaactgacgtaactggtatcatccaattaccagaaggtactgaaatggtaatgcctggtgacaacatcgaaatgactatcgaacttatcgctccaatcgctatcgaagagggaactaa

SEQ ID NO: 7 - DNA, 829 bp, Bacillus cereus
  ref <308>: DATABASE ACCESSION NUMBER: ATCC 14579
cggcggtatcttagtagtatctgctgctgatggcccaatgcctcaaacacgtgagcacatccttctttctcgtcaagtaggtgttccttacatcgttgtattcttaaacaaatgcgacatggtagatgacgaagaattattagaattagtagaaatggaagttcgcgacctattatctgaatacggattcccaggcgacgacattcctgtaatcaaaggttctgctcttaaagctcttcaaggagaagctgattgggaagcaaaaatcattgaattaatggctgaagttgatgcttacatcccaactccagaacgtgaaactgacaaaccattcttaatgcctgtagaggacgtattctctatcacaggtcgtggtacagttgctactggtcgtgttgagcgcggtatcgttaaagttggtgacgtagtagaaatcatcggtcttgctgaagaaaatgcttctacaactgtaactggtgtagagatgttccgtaaacttcttgaccaagctcaagctggagacaacatcggtgctttacttcgtggggttgctcgtgaagacatccaacgtggacaagtacttgcaaaaagcggttctgtaaaagctcacgctaaattcaaagctgaagttttcgtattatctaaagaagaaggtggacgtcacactccattcttcgctaactaccgtcctcagttctacttccgtacaactgacgtaactggtatcatccaattaccagaaggtactgaaatggtaatgcctggtgacaacattgaaatgactatcgaacttatcgctccaatcgctatcgaagagggaactaaattc

SEQ ID NO: 8 - DNA, 818 bp, Bacteroides distasonis
  ref <308>: DATABASE ACCESSION NUMBER: ATCC 8503
cggtgctatcatcgtagttgctgctactgatggtcctatgcctcaaactcgcgagcacatccttttggctcgtcaggtaaacgttccgagattggttgtattcatgaacaagtgtgacatggttgacgacgaggaaatgttggaattggttgagatggagatgagagagttgctttcattctatcaattcgacggtgacaacactccgatcatccgtggttctgctcttggtgcattgaacggtgatgctcaatgggaagataaagtaatggagttgatggaagcttgtgatacttggattcctctgcctccgcgcgaaatcgacaagccgttcttgatgccggttgaggacgtattctcaatcacgggtcgtggtactgttgctacaggtcgtatcgagacaggtattgttaaggttggtgaggaagttcagatcatcggtcttggcgctgctggtaagaaatctgttgttacaggtgttgagatgttccgtaagttattggatcaaggtgaggctggtgataacgttggtttgttgcttcgcggtatcgataagaatgagatcaagcgtggtatggtaatctgccacccgggtcaggttaaagagcattctaagttcaaggctgaggtttatatcttgaagaaagaggaaggtggtcgtcacactccgttccacaacaaatatcgtcctcagttctatatccgtacattggatgtaactggtgagatcactttgccggaaggaactgaaatggtaatgccgggtgataacgtaacgatcgaggttgagttgatctatccggtagcatgtagcgtag

SEQ ID NO: 9 - DNA, 639 bp, Enterococcus casseliflavus
  strain R763
ggtcctatgcctcaaacacgtgaacacatcttgttatcacgtaacgttggtgtaccatacatcgttgttttcttaaacaaaatggatatggttgatgacgaagaattactagaattagttgaaatggaagttcgtgacttattgtcagaatatgacttcccaggcgacgatgttcctgtaatcgctggttctgctttgaaagctcttgaaggcgatgcttcatacgaagaaaaaatcatggaattaatggctgcagttgacgaatacgttccaactccagaacgtgacactgacaaaccattcatgatgccagtcgaagacgtattctcaatcactggacgtggtactgttgctacaggccgtgttgaacgtggacaagttcgcgttggtgacgaagttgaaatcgttggtattgctgaagaaactgctaaaacaactgtaactggtgttgaaatgttccgtaaattgttagactatgctgaagcaggggataacattggtgcattgctacgtggtgttgctcgtgaagacatccaacgtggacaagtattggctaaagctggtacaatcacacctcatacaaaatttaaagctgaagtttacgttttaacaaaagaagaaggtggacgtcacacacca

SEQ ID NO: 10 - DNA, 692 bp, Staphylococcus saprophyticus
  strain CSG 197
gaacacattcttttatcacgtaacgttggtgttccagcattagttgtattcttaaacaaagttgacatggttgacgatgaagaattattagaattagtagaaatggaagttcgtgacttattaagcgaatatgacttcccaggtgacgatgtacctgtaatctctggttctgcattaaaagctttagaaggcgacgctgactatgagcaaaaaatcttagacttaatgcaagctgttgatgacttcattccaacaccagaacgtgattctgacaaaccattcatgatgccagttgaggacgtattctcaatcactggtcgtggtactgttgctacaggccgtgttgaacgtggtcaaatcaaagtcggtgaagaaatcgaaatcatcggtatgcaagaagaatcaagcaaaacaactgttactggtgtagaaatgttccgtaaattattagactacgctgaagctggtgacaacattggtgcattattacgtggtgtttcacgtgatgacgtacaacgtggtcaagttttagctgctcctggtactattacaccacatacaaaattcaaagcggatgtttacgttttatctaaagatgaaggtggtcgtcatacaccattcttcactaactaccgcccacaattctatttccgtactactgacgtaactggtgttgttaacttaccagaagg

SEQ ID NO: 11 - DNA, 821 bp, Bacteroides ovatus
  ref <308>: DATABASE ACCESSION NUMBER: ATCC 8483
cggtgctatcatcgtttgtgctgcaactgatggtccgatgcctcaaactcgcgaacacattctgttagctcgtcaggtaaacgtacctcgtctggttgtattcttgaacaaatgcgatatggtagacgacgaagaaatgttggaactcgttgaaatggaaatgagagaactcctttcattctatgatttcgatggtgacaatactcctatcatccgtggttctgctcttggcgcattgaacggtgttgaaaaatgggaagacaaagttatggaactgatggatgcagttgataactggattccactgcctccgcgcgatgttgataaaccattcttgatgccggttgaagacgtgttctctatcacaggtcgtggtactgtagcaacaggtcgtatcgaaacaggtgtcatccacgttggtgatgaagtcgaaattcttggtttaggtgaagataagaaatcagttgtaactggtgttgaaatgttccgtaaactgttggatcaaggtgaagctggtgacaacgtaggtcttttgcttcgtggtattgacaagaacgaaatcaaacgtggtatggttctttgtaaaccaggtcagattaaaccgcactctaaattcaaagctgaggtttatatcttgaagaaagaagaaggtggtcgtcacactccgttccacaacaaataccgtcctcagttctacttgcgtactatggactgtacaggtgaaatcactttgccggaaggaacagaaatggtaatgccgggtgataacgtaactattacagttgagttgatttacccagtagcattgaacccgggcttcg

SEQ ID NO: 12 - DNA, 838 bp, Bartonella henselae
  ref <308>: DATABASE ACCESSION NUMBER: ATCC 49882
tggtgcgattttggttgtttcagctgctgatggtccgatgcctcaaacacgtgagcatattcttcttgcccgtcaggttggtgttccagcgattgttgtttttcttaataaggttgatcaggttgatgatgctgagcttttggagcttgttgagcttgaagttcgggagttattgtcgaaatatgattttccaggagacgatattccgatcgttaaaggttctgctttggcagcgcttgaagataaagataaaagcattggtgaagatgcggttcgtcttttgatgagtgaagttgataattatataccgacgcctgaacgtcctgttgatcagccgtttttgatgccaattgaagatgttttttcgatttcgggtcgtggaactgttgtgacgggtcgtgttgagcgtggtgttattaaggttggtgaagaagttgagattatcggcattcgtccaacttctaagacaacagttacaggggttgaaatgttccgcaagcttttagatcaggggcaagcgggtgataatattggagcgctgcttcgtggtattgatcgtgaagggattgagcgtggacaagttttggcgaagcctgcttcggttacacctcatacgagatttaaagcagaggcttacattttgacgaaagatgaaggtggtcgtcatactccatttttcacgaattatcgtcctcagttttatttccgtactacggatgtaacgggaattgttacgcttccagaaggtacagagatggttatgcctggtgataatgttgctatggatgtctctctgattgttccaattgccatggaagaaaaacttcgttttgctatc

SEQ ID NO: 13 - DNA, 839 bp, Bifidobacterium adolescentis
  ref <308>: DATABASE ACCESSION NUMBER: ATCC 15703
tggcgccatccttgttgtggccgccaccgacggcccgatggctcagacccgcgagcacgtgctgctcgctcgtcaggtgggcgtcccgaagatcctcgtcgctctgaacaagtgcgatatggtcgacgacgacgagctcatcgagctcgttgaggaagaggtccgtgacctcctcgacgaaaatggcttcgatcgcgattgcccggtcatccacgtgtccgcttacggcgcactgcacgatgacgctccggaccacgagaagtgggttgagcagatcaagaagctcatggacgccgtcgatgactacatcccgaccccggtccacgatctggacaagccgttcctgatgccgatcgaagatgtcttcaccatctccggccgtggcaccgtggtgaccggccgtgtcgagcgtggtaagctcccggtcaactccaacgtcgagatcgtcggcatccgtccgacccagaccaccaccgtcacctccatcgagaccttccacaagcagatggacgagtgcgaggctggcgacaacaccggtctgctgctccgcggcatcaaccgtgaccaggtcgagcgtggccaggttctggctgctccgggctccgtgaccccgcacaccaagttcgagggcgaagtctacgtgctgaccaaggacgaaggcggccgtcactcgccgttcttctccaactaccgtccgcagttctacttccgtaccaccgacgtcaccggcgtcatcaccctgccggaaggcgttgagatggtgcagccgggcgatcacgctaccttcggcgttgagctgatccagccgatcgctatggaagagggcctgaccttcgcag

SEQ ID NO: 14 - DNA, 839 bp, Bifidobacterium dentium
  ref <308>: DATABASE ACCESSION NUMBER: ATCC 27534
tggcgctatcctcgttgtggccgccaccgacggcccgatggctcagacccgcgagcacgtgctgctcgctcgtcaggtgggcgtgccgcgtatcctcgtcgccctgaacaagtgcgatatggtcgacgacgaagagctcatcgagctcgttgaggaagaggtccgtgacctcctcgacgaaaacggcttcgatcgcgattgcccggtcatccacacctccgcctacggcgcgctgcacgatgacgctccggaccacgacaagtgggttgagtccgtcaaggaactcatgaaggccgtcgacgagtacatcccgaccccgacccacgatctggacaagccgttcctgatgccgatcgaagatgtgttcaccatctccggccgtggcaccgtggttaccggccgtgtcgagcgtggtaagctcccggtcaactccaacgttgagatcgtcggcatccgtccgacccagaccaccaccgtcacctccatcgagaccttccacaagcagatggacgagtgcgaggctggcgacaacaccggtctgctgctccgcggcatcaaccgtgaccaggtcgagcgtggccaggttctggctgctccgggctccgtgaccccgcacaccaagttcgagggcgaagtctacgtgctgaccaaggacgaaggcggccgtcactcgccgttcttctccaactaccgtccgcagttctacttccgtaccaccgacgtcaccggcgtcatcaccctgccggaaggcgttgagatggtgcagccgggcgatcacgctaccttcggcgttgagctgatccagccgatcgctatggaagagggcctgaccttcgcag

SEQ ID NO: 15 - DNA, 838 bp, Brucella abortus
  strain S2308
tggcgcgatcctggtggtttcggctgctgacggcccgatgccgcagacccgcgagcacatcctgcttgcccgtcaggttggcgttccggcgatcgtcgtgttcctcaacaagtgcgaccaggttgacgatgcagaactgctcgaactggttgaactggaagtgcgcgaacttctgtcgaagtacgaattccccggcgacgaaatcccgatcatcaagggctcggctcttgctgctctggaagattcttccaaggaactgggcgaagatgccatccgcaacctgatggacgcggttgacagctacattccgaccccggaacgcccgatcgaccagccgttcctgatgccgatcgaagacgtgttctcgatctccggccgtggtacggttgtgacgggtcgcgttgagcgcggtatcgttaaggtcggtgaagaagttgaaatcgtcggcatcaaggcgacgacgaagaccacggttaccggcgttgaaatgttccgcaagctgctcgaccagggccaggctggcgacaacattggcgcgctgatccgcggcgttggccgtgaagacgttgaacgcggccaggttctctgcaagccgggttctgtgaagccgcacaccaagtttaaggcagaagcctatattctgaccaaggacgaaggtggccgtcatacgccgttcttcaccaactaccgtccgcagttctacttccgtacgacggacgtgacgggtgttgtgacgcttccggctggcacggaaatggtcatgcctggcgataacgtcgccatggacgttaccctgatcgtgccgatcgccatggaagagaagcttcgcttcgctatc

SEQ ID NO: 16 - DNA, 771 bp, Burkholderia cepacia
  strain LSPQ 2217
ggcagcagacggcccgatgccgcaaacgcgtgagcacatcctgctggcgcgtcaggttggcgttccgtacatcatcgtgttcctgaacaagtgcgacatggtggacgacgccgaactgctcgagctggtcgagatggaagttcgcgaactcctgtcgaagtacgacttcccgggcgacgacacgccgatcgtgaagggttcggcgaagctggcgctggaaggcgacacgggcgagctgggcgaagtggcgatcatgagcctggccgacgcgctggacacgtacatcccgacgccggagcgtgcagttgacggcgcgttcctgatgccggtggaagacgtgttctcgatctcgggccgcggtacggtggtgacgggtcgtgtcgagcgcggcatcgtgaaggtcggcgaagaaatcgaaatcgtcggtatcaagccgacggtgaagacgacctgcacgggcgttgaaatgttccgcaagctgctggaccaaggtcaagcaggcgacaacgttggtatcctgctgcgcggcacgaagcgtgaagacgtggagcgtggccaggttctggcgaagccgggttcgatcacgccgcacacgcacttcacggctgaagtgtacgtgctgagcaaggacgaaggcggccgtcacacgccgttcttcaacaactaccgtccgcagttctacttccgtacgacggacgtgacgggctcgatcgagctgccgaaggacaaggaaatggtgatgccgggcgacaacgtgtcgatcacggtgaa

SEQ ID NO: 17 - DNA, 829 bp, Cedecea davisae
  ref <308>: DATABASE ACCESSION NUMBER: ATCC 33431
ggcgctatcctggttgttgctgcgactgatggcccaatgccacagacccgtgagcacatcctgctgggtcgtcaggttggcgttccgtacatcatcgtgttcctgaacaaatgcgacatggttgatgacgaagagctgctggaactggtagaaatggaagttcgtgaacttctgtcccagtacgacttcccgggcgacgatactccaatcgttcgtggttctgctctgaaagcgctggaaggcgaagcagagtgggaagctaaaatcgttgagctggctggctacctggattcttacatccctgagccagagcgtgctatcgataagccgttcctgctgccaatcgaagacgtattctccatctccggccgtggtaccgttgttaccggtcgtgtagagcgcggtatcatcaaagttggtgaagaagttgaaatcgttggtatcaaagatactgcgaaatctacctgtaccggcgttgaaatgttccgcaaactgctggacgaaggccgtgctggtgagaacgttggtgttctgctgcgtggtatcaaacgtgaagaaatcgaacgtggtcaggtactggctaagccaggctctatcaagccacacaccaagttcgaatctgaagtgtacatcctgtccaaagacgaaggcggccgtcatactccgttcttcaaaggctaccgtccacagttctacttccgtacaactgacgtgaccggcaccatcgaactgccagaaggcgttgagatggtaatgcctggcgacaacatcaaaatggttgttaccctgatccacccaatcgcgatggatgacggtctgcgtttcgcaa

SEQ ID NO: 18 - DNA, 824 bp, Cedecea neteri
  ref <308>: DATABASE ACCESSION NUMBER: ATCC 33855
cgctatcctggttgttgctgcgactgacggccctatgcctcagacccgtgagcacatcctgctgggtcgtcaggttggcgttccttacatcatcgtgttcctgaacaaatgtgacatggttgatgacgaagagctgctggagctggttgaaatggaagttcgtgaacttctgtctcagtacgacttcccgggcgatgacactccaatcatccgtggttctgctctgaaagcgctggaaggcgaagcagagtgggaagctaaaatygttgagctggctggcttcctggattcctacatcccagaaccagtacgtgcaatcgayctgccgttcctgctgccaatcgaagacgtattctccatctccggccgtggtaccgttgttaccggtcgtgtagagcgcggtatcgttaaagtgggcgaagaagtagaaatcgttggtatcaaagatactgcgaaatctacctgtaccggcgttgaaatgttccgcaaactgctggacgaaggccgtgctggtgagaacgttggtgttctgctgcgtggtatcaaacgtgaagaaatcgaacgtggtcaggttctggctaagccaggctctatcaagccgcacaccaagttcgaatctgaagtgtacatcctgtccaaagacgaaggcggccgtcatactccgttcttcaaaggctaccgtccacagttctacttccgtacaactgacgtgaccggtaccatcgaactgccagaaggcgtagagatggtaatgccaggcgacaacatcaaaatggttgttaccctgatccacccaatcgcgatggacgacggtctgcgtttcg

SEQ ID NO: 19 - DNA, 827 bp, Cedecea lapagei
  ref <308>: DATABASE ACCESSION NUMBER: ATCC 33432
cgctattctggttgttgctgcaactgacggccctatgcctcagacccgtgagcacatcctgctgggtcgccaggttggcgttccttacatcatcgtgttcctgaacaaatgtgacatggttgatgacgaagagctgctggagctggtagaaatggaagttcgtgaacttctgtctcagtacgacttcccaggcgatgataccccaatcatccgtggttctgctctgaaagcgctggaaggcgaagcagagtgggaagctaaaatcgttgagctggctggcttcctggattcctacatcccagaaccagtacgtgcaatcgacctgccgttcctgctgccaatcgaagacgtattctccatctccggccgtggtaccgttgtkaccggtcgtgtagagcgcggtatcgttaaagtgggcgaagaagtagaaatcgttggtatcaaagatactgcgaaatctacctgtactggcgttgaaatgttccgcaaactgctggacgaaggccgtgctggtgagaacgttggtgttctgctgcgtggtatcaaacgtgaagaaatcgaacgtggtcaggttctggctaagccaggctctatcaagccgcacaccaagttcgaatctgaagtgtacatcctgtccaaagacgaaggcggccgtcatactccgttcttcaarggctaccgtccacagttctacttccgtaccactgacgtgaccggtaccatcgaactgccagaaggcgtagagatggtaatgccaggtgacaacatcaaaatggttgttaccctgatccacccaatcgcgatggacgacggtctgcgtttcgcaa

SEQ ID NO: 20 - DNA, 831 bp, Chlamydia pneumoniae
  strain CWL 029
gcggagctatcctagtcgtttcagctacagacggagctatgccacaaactaaagaacatatcttgctagctcgccaggttggagttccttatatcgttgttttcttgaataaagtagatatgatctctcaagaagatgctgaacttattgaccttgttgagatggaacttagtgagcttcttgaagaaaaaggctacaaaggatgccctattatccgtggttctgctttgaaagctcttgaaggtgatgcaaattatatcgaaaaagttcgagaacttatgcaagctgtggatgacaacatccctacaccagaaagagaaattgataagcctttcttaatgcctatcgaagacgtattctcaatctctggtcgtggtactgtggttacaggaagaatcgagcgtggaatcgttaaagtttctgataaagttcagctcgtgggattaggagagactaaagaaacaatcgttactggagtcgaaatgttcaggaaagaacttcctgaaggtcgtgcaggagaaaacgttggtttactcctcagaggtattggaaagaacgatgttgaaagaggtatggtggtttgtcagcctaacagcgtgaagcctcatacgaaatttaagtcagctgtttacgttcttcagaaagaagaaggcggacgtcataagcctttcttcagcggatacagacctcagttcttcttccgtactacagacgtgacaggagtcgtaactcttcctgaaggaactgaaatggtaatgcctggagataacgttgagcttgatgttgagctcattggaacagttgctcttgaagaaggaatgagatttgcaa

SEQ ID NO: 21 - DNA, 826 bp, Chlamydia psittaci
tggagcgattctcgttgtttccgctactgacggtgcgatgcctcagaccaaagaacatattcttttggcgagacaggttggtgttccttacatcgttgttttccttaacaaaatcgatatgatttctcaagaagatgctgagctcgtagacttagttgaaatggaattgtccgaacttctagaagaaaaaggttataaaggttgcccaattatccgtggttctgctttgaaagccttagaaggtgatgcaagctacgttgaaaaaattcgcgagttaatgcaagcagtggatgataacatccctactccagagcgtgaagttgataagcctttcttaatgcctatcgaagacgtattctctatttctggtcgtggtactgtggtcacaggacgtatcgagcgtggaatcgttaaagtgggtgataaagtacagattgttggtttaagagatactagagagacaattgttaccggtgtggaaatgttcagaaaagaacttccagaaggtcaagcaggggaaaacgttggtttgctcctcagaggtatcggtaagaatgacgttgaacgtggtatggttatctgccaacctaatagcgtgaaatctcacacacaatttaaaggtgctgtctacattctacaaaaagaagagggtggacgtcataaacctttctttaccggatacagacctcagttcttcttccgtacaacagatgttacaggtgttgtaactctcccagaaggtacagagatggttatgccaggcgataacgttgaattcgaagttcaattaattagcccagtagctctagaagaaggtatgagattt

SEQ ID NO: 22 - DNA, 822 bp, Chlamydia trachomatis
  strain LGV 12
ggggctattctagtagtttctgcaacagacggagctatgcctcaaactaaagagcatattcttttggcaagacaagttggggttccttacatcgttgtttttctcaataaaattgacatgatttccgaagaagacgctgaattggtcgacttggttgagatggagttggctgagcttcttgaagagaaaggatacaaagggtgtccaatcatcagaggttctgctctgaaagctttggaaggggatgctgcatacatagagaaagttcgagagctaatgcaagccgtcgatgataatatccctactccagaaagagaaattgacaagcctttcttaatgcccattgaggacgtgttctctatctccggacgaggaactgtagtaactggacgtattgagcgtggaattgttaaagtttccgataaagttcagttggtcggtcttagagatactaaagaaacgattgttactggggttgaaatgttcagaaaagaactcccagaaggtcgtgcaggagagaatgttggattgctcctcagaggtattggtaagaacgatgtggaaagaggaatggttgtttgcttgccaaacagtgttaaacctcatacacggtttaagtgtgctgtttacgttctgcaaaaagaagaaggtggacgacataagcctttcttcacaggatatagacctcaattcttcttccgtacaacagacgttacaggtgtggtaactctgcctgagggagttgagatggtcatgcctggggataacgttgagtttgaagtgcagttgattagccctgtggctttagaagaaggtatgaga

SEQ ID NO: 23 - DNA, 835 bp, Chryseobacterium meningosepticum
  strain CDC B7681
cggagctatcttagtatgtgctgctacagatggtccaatgcctcaaactagagaacacatcctactttgccgtcaggtaaacgtacctagaattgttgtgttcatgaacaaagttgacatggtagatgatccagaattgttagagcttgttgagcttgaacttagagatctattatctacttacgaatatgatggtgataactctccagtaattcaaggttctgctcttggtgctcttaacggtgatgctaagtgggtagctactgtagaagctctaatggatgctgttgatacttggatcgagcaaccagtaagagattctgataagccattccttatgccaatcgaagacgtattctctattacaggtagaggtactgtagcaactggtagaatcgaggctggtgtaatcaacacaggtgatcctgttgacatcgtaggtatgggtgacgagaagttaacttctactattacaggtgttgagatgtttagaaaaatcctagacagaggtgaagctggtgataacgtaggtctattgttgagaggtattgaaaagactgacatcaagagaggtatggttatcgctaagaaagattcagttaagccacacaagaaattcaaagctgaggtttatatcctttctaaagaagaaggtggacgtcacactccattccacaacaaataccgtcctcagttctatgtaagaactactgacgttacaggtgaaatcttcttaccagaaggtgtagaaatggtaatgcctggtgataacttaactatcactgtagaattgttacaaccaatcgctcttaacgagggtcttagattcgcgatc

SEQ ID NO: 24 - DNA, 816 bp, Citrobacter amalonaticus
  ref <308>: DATABASE ACCESSION NUMBER: ATCC 25405
cggcgcgatcctggttgttgctgcgactgacggcccgatgccgcagactcgtgagcacatcctgctgggtcgtcaggtaggcgttccgtacatcatcgtgttcctgaacaaatgcgacatggttgatgacgaagagctgctggaactggtagaaatggaagttcgtgaacttctgtctcagtacgatttcccgggcgacgacaccccgatcgttcgtggttctgctctgaaagcgctggaaggcgacgcagagtgggaagcgaaaatcatcgaactggccggcttcctggattcttacatcccggaaccagagcgtgcgattgacaagccgttcctgctgccgatcgaagacgtattctccatctccggtcgtggtaccgttgttaccggtcgtgtagaacgcggtatcatcaaagtgggcgaagaagttgaaatcgttggtatcaaagagactgccaagtctacctgtactggcgttgaaatgttccgcaaactgctggacgaaggccgtgcgggtgagaacgttggtgttctgctgcgtggtatcaaacgtgaagaaatcgaacgtggtcaggtactggctaagccgggcwccatcaagccgcacaccatgttcgaatcygaagtgtacatcctgtccaaagacgaaggcggccgtcatactccgttcttcaaaggctaccgtccgcagttctacttccgtacaactgacgtgactggcaccatcgaactgccggaaggcgttgagatggtaatgccgggcgacaacatcaaaatggttgttaccctgatccacccgatcgcgatggacgacgg

SEQ ID NO: 25 - DNA, 825 bp, Citrobacter braakii
  ref <308>: DATABASE ACCESSION NUMBER: ATCC 43162
cgcgatcctggttgttgctgcaactgacggcccgatgccgcagactcgtgagcacatcctgctgggtcgycaggtaggcgttccgtacatcatcgtgttcctgaacaaatgcgacatggttgatgacgaagagctgctggaactggtagaaatggaagttcgtgaacttctgtctcagtacgatttcccgggcgacgacacgccgatcgttcgtggttctgctctgaaagcgctggaaggcgawgcagagtgggaagcgaaaatcatcgaactggctggcttcctggattcttacatcccggaaccagagcgtgcgattgacaagccgttcctgctgcctatcgaagacgtattctccatctctggtcgtggtaccgttgttaccggtcgtgtagagcgcggtatcatcaaagttggtgaagaagttgaaatcgttggtatcaargacactgctaagtctacctgtactggcgttgaaatgttccgcaaactgctggacgaaggccgtgctggtgagaacgttggtgttctgctgcgtggtatcaagcgtgaagaaatcgaacgtggtcaggtactggctaagccgggctctatcaagccgcacaccaagttcgaatctgaagtgtacattctgtccaaagacgaaggcggccgtcatactccgttcttcaarggctaccgtccgcagttctacttccgtactactgacgtgactggtaccatcgaactgccggaaggcgttgagatggtaatgccgggcgacaacatcaaaatggttgttaccctgatccacccaatcgcgatggacgacggtctgcgtttcgc

SEQ ID NO: 26 - DNA, 830 bp, Citrobacter koseri
  ref <308>: DATABASE ACCESSION NUMBER: ATCC 27156
cggcgcgatcctggttgttgctgcgactgacggcccgatgccgcagacccgtgagcacatcctgctgggtcgtcaggtaggcgttccgtacatcatcgtgttcctgaacaaatgcgacatggttgatgacgaagagctgctggaactggttgagatggaagtgcgtgaactgctgtctcagtacgatttcccgggcgacgacacgccgatcgttcgtggttctgctctgaaagcgctggaaggcgamgctgagtgggaagcgaaaatcatcgaactggctggctacctggattcttacatcccggaaccagagcgtgcgattgacaagccgttcctgctgccgatcgaagacgtattctccatctccggtcgtggtaccgttgttaccggtcgtgtagagcgcggtatcatcaaagtgggcgaagaagttgaaatygttggtatcaaagagactgcgaagtctacctgtactggcgttgaaatgttccgcaaactgctggacgaaggccgtgctggtgagaacgtaggtgttctgctgcgtggtatcaaacgtgaagaaatcgaacgtggtcaggtactggctaagccgggytccatcaagccgcacaccaagttcgaatctgaagtgtacatyctgtcyaaagatgaaggcggccgtcatactccgttcttcaaaggctaccgtccgcagttctacttccgtacaactgacgtgactggcaccatcgaactgccggaaggcgtagagatggtaatgccgggcgacaacatcaaaatggttgttaccctgatccacccgatcgcgatggacgacggtctgcgtttcgcaa

SEQ ID NO: 27 - DNA, 827 bp, Citrobacter farmeri
  ref <308>: DATABASE ACCESSION NUMBER: ATCC 51112
cgcgatcctggttgttgctgcgactgacggcccgatgccgcagactcgtgagcacatcctgctgggtcgtcaggtaggcgttccgtacatcatcgtgttcctgaacaaatgcgacatggttgatgacgaagagctgctggaactggtagagatggaagttcgtgaactgctgtctcagtacgatttcccgggcgacgacacgccgatcgttcgtggttctgctctgaaagcgctggaaggcgacgcagagtgggaagcgaaaatcatcgaactggcaggcttcctggattcttacatcccggaaccagagcgtgcgattgacaagccgttcctgctgccgatcgaagacgtattctccatctctggtcgtggtaccgttgttaccggtcgtgtagagcgcggtatcatcaaagtgggtgaagaagttgaaatcgttggtatcaaagagactgccaagtctacctgtactggcgttgaaatgttccgcaaactgctggacgaaggccgtgctggtgagaacgtaggtgttctgctgcgtggtatcaaacgtgaagaaatcgaacgtggtcaggtactggctaagccgggcwccatcaagccrcacactatgttcgaatctgaagtgtacattctgtccaaagacgaaggcggccgtcatactccgttcttcaaaggctaccgtccgcagttctacttccgtacgactgacgtgactggcaccatcgaactgccggaaggtgttgagatggttatgccgggcgacaacatcaaaatggttgttaccctgatccacccgatcgcgatggacgacggtctgcgtttcgcaa

SEQ ID NO: 28 - DNA, 797 bp, Citrobacter freundii
  ref <308>: DATABASE ACCESSION NUMBER: ATCC 8090
cctggttgttgctgcgactgacggcccgatgccgcagactcgtgagcacatcctgctgggtcgtcaggtaggcgttccgtacatcatcgtgttcctgaacaaatgcgacatggttgatgacgaagagctgctggaactggtagaaatggaagttcgtgaacttctgtctcagtacgatttcccgggcgacgacactccgatcgttcgtggttctgctctgaaagcgctggaaggcgaagcagagtgggaagcgaaaatcatcgaactggctggcttcctggattcttacatcccagaaccagagcgtgcgattgacaagccgttcctgctgcctatcgaagacgtattctccatctccggtcgtggtaccgttgttaccggtcgtgtagagcgcggtatcatcaaagttggtgaagaagttgaaatcgttggtatcaaagagactgctaagtctacctgtactggcgttgaaatgttccgcaaactgctggacgaaggccgtgctggtgagaacgttggtgttctgctgcgtggtatcaaacgtgaagaaatcgaacgtggtcaggtactggctaagccgggctctatcaagccgcacaccaagttcgaatctgaagtgtacattctgtccaaagacgaaggcggccgtcatactccgttcttcaaaggctaccgtccgcagttctacttccgtactactgacgtgactggtaccatcgaactgccggaaggcgtagagatggtaatgccgggcgacaacatcaaaatggttgttaccctgatccacccaatcgcga

SEQ ID NO: 29 - DNA, 826 bp, Citrobacter sedlakii
  ref <308>: DATABASE ACCESSION NUMBER: ATCC 51115
cggcgcgatcctggttgttgccgcgactgacggcccgatgccgcagacccgtgagcacatcctgctgggtcgtcaggtaggcgttccgtacatcatcgtgttcctgaacaaatgcgacatggttgatgacgaagagctgctggaactggtagagatggaagttcgtgaactgctgtctcagtacgatttcccgggcgacgacacgccgatcgttcgtggttcagctctgaaagcgctggaaggcgacgcagagtgggaagcgaaaatcatcgaactggctggcttcctggattcttacattccggaaccagagcgtgcgattgacaagccgttcctgctgccgatcgaagacgtattctccatctccggtcgtggtaccgttgttaccggtcgtgtagagcgcggtatcatcaaagtgggcgaagaagttgaaatcgttggtatcaaagagactgcgaagtctacctgtactggcgttgaaatgttccgcaaactgctggacgaaggccgtgcgggtgagaacgtaggtgttctgctgcgtggtatcaaacgtgaagaaatcgaacgtggtcaggtactggcgaagccgggcaccatcaagccgcacaccaagttcgaatctgaagtgtatattctgtccaaagatgaaggcggccgtcatactccgttcttcaaaggctaccgtccgcagttctacttccgtacaactgacgtgactggcaccatcgaactgccggaaggcgtagagatggtaatgccgggcgacaacatcaaaatggttgttaccctgatccacccgatcgcgatggacgacggtctgcgtttc

SEQ ID NO: 30 - DNA, 823 bp, Citrobacter werkmanii
  ref <308>: DATABASE ACCESSION NUMBER: ATCC 51114
gcgatcctggttgttgctgcgactgacggcccgatgccgcagactcgtgagcacatcctgctgggtcgtcaggtaggcgttccgtacatcatcgtgttcctgaacaaatgcgacatggttgatgacgaagagctgctggaactggtagaaatggaagttcgtgaacttctgtctcagtacgatttcccgggcgacgacactccgatcgttcgtggttctgctctgaaagcgctggaaggcgaagcagagtgggaagcgaaaatcatcgaactggctggctttctggattcttacatcccggaaccagagcgtgcgattgacaagccgttcctgctrcctatcgaagacgtattctccatctccggtcgtggtaccgttgttaccggtcgtgtagagcgcggtatcatcaaagttggtgaagaagttgaaatcgttggtatcaaagacaccgctaagtctacctgtaccggcgttgaaatgttccgcaaactgctggacgaaggccgtgctggtgagaacgttggtgttctgctgcgtggtatcaaacgtgaagaaatcgaacgtggtcaggtactggctaagccgggctctatcaagccgcacaccaagttcgaatctgaagtgtacatcctgtccaaagacgaaggcggccgtcatactccgttcttcaaaggctaccgtccgcagttctacttccgtactactgacgtgactggtaccatcgaactgccggaaggcgtagagatggtaatgccgggcgacaacatyaaaatggttgttacyctgatccacccgatcgcgatggacgacggtctgcgtttcg

SEQ ID NO: 31 - DNA, 826 bp, Citrobacter youngae
  ref <308>: DATABASE ACCESSION NUMBER: ATCC 29935
ggcgcgatcctggttgttgctgcgactgacggcccgatgccgcagactcgtgagcacatcctgctgggtcgtcaggtaggcgttccgtacatcatcgtgttcctgaacaaatgcgacatggttgatgacgaagagctgctggaactggtagaaatggaagttcgtgaacttctgtctcagtacgatttcccgggcgacgatacgccgatcgttcgtggttctgctctgaaagcgctggaaggcgaagcagagtgggaagcgaaaatcatcgaactggctggcttcctggattcttacatcccggaaccagaacgtgctatcgataagccgttcctgctgccaatcgaagacgtattctccatctccggtcgtggtaccgttgttactggtcgtgtagaacgcggtatcatcaaagttggtgaagaagttgaaatcgttggtatcaaagagactgccaagtctacctgtactggcgttgaaatgttccgcaaactgctggacgaaggccgtgctggtgagaacgttggtgttctgctgcgtggtatcaaacgtgaagaaatcgaacgtggtcaggtactggctaagccgggctctatcaagccgcacaccaagttcgaatctgaagtgtacattctgtccaaagacgaaggcggccgtcatactccgttcttcaaaggctaccgtccgcagttctacttccgtactactgacgtgacgggtaccatcgaactgccggaaggcgtagagatggtaatgccgggcgacaacatcaaaatggttgttaccctgatccacccaatcgcgatggatgacggtctgcgtttcg

SEQ ID NO: 32 - DNA, 841 bp, Clostridium perfringens
  ref <308>: DATABASE ACCESSION NUMBER: ATCC 13124
cggagctatattagtttgttcagcagctgatggtccaatgcctcaaacaagagagcacatcttattatcatcaagagttggagttgaccacatcgtagtattcttaaacaaagcagatatggttgacgacgaagaattattagaattagttgaaatggaagttagagagttattaagcgagtacaacttcccaggagacgayattccagtaatcaarggatcagctttagtagcattagaaaacccaactgacgaagctgcaacagcttgtatcagagagttaatggatgctgtagatagctacatcccaacaccagaaagagcaacagataagccattcttaatgccagtagaggacgtattcacaatcactggtagaggaacagttgcaacaggaagagttgaaagaggagttctacatgtaggagacgaagtagaagtaatcggattaactgaagaaagaagaaaaactgttgtaacaggaatcgaaatgttcagaaagttattagatgaagcacaagctggagataacatcggagcattattaagaggtatccaaagaactgayatcgaaagaggtcaagttttagctcaagttggaacaatcaacccacacaaaaaattcgtaggtcaagtatacgtacttaaaaaagaagaaggtggaagacatactccattcttcgatggatacagaccacaattctacttcagaacaacagacgttacaggatcaatcaaattaccagaaggaatggaaatggttatgcctggagaccacatcgacatggaagttgaattaatcacagaaatcgctatggaygaaggattaagattcgctatc

SEQ ID NO: 33 - DNA, 822 bp, Comamonas acidovorans
  ref <308>: DATABASE ACCESSION NUMBER: ATCC 15668
cggcgccatcctggtgtgctcggccgctgacggccccatgccccagacccgcgagcacatcctgctggcccgtcaggtgggcgtgccctacatcatcgtgttcctgaacaagtgcgacatggtggacgacgaagagctgctggaactggtcgaaatggaagtgcgcgagctgcttgccaagtacgacttccccggcgacgacacccccatcatccgcggctcggccaagctggccctggaaggcgaccagtccgacaagggcgaacctgccatcctgcgcctggctgaagcactggactcctacatccccacgcccgagcgcgctgtggacggcgcctttgcaatgcccgtggaagacgtgttctcgatctctggccgtggcaccgtggtgactggccgtatcgagcgcggcatcatcaaggtcggcgaagaaatcgaaatcgtcggtatccgcgacacccagaagaccatcgtcaccggcgtggaaatgttccgcaagctgctggaccaaggtcaagctggcgacaacgtgggtctgctgctgcgcggcaccaagcgtgaagacgtggaacgcggccaagtgctgtgcaagcccggctccatcaagccccacacccacttcacggctgaggtgtacgtgctgtccaaggacgaaggtggtcgccacactccgttcttcaacaactaccgtccccagttctatttccgtacgaccgacgtgaccggctccatcgagctgcccgccgacaaggaaatggtgatgcctggcgacaacgtgtcgatcaccgtcaagctgatcgcccccatcgccatggaagaagg

SEQ ID NO: 34 - DNA, 702 bp, Corynebacterium bovis
  ref <308>: DATABASE ACCESSION NUMBER: ATCC 7715
gccgcagacccgtgagcacgtcctcctggcccgtcaggtcggtgtgccctacatcctcgtcgccctcaacaagtgcgacatggtcgacgacgaggacctcatcgagctcgtcgagatggaggtccgtgagctcctcgccgagcaggactacgacgaggacgccccgatcatccacatctccgccctcaaggccctcgagggtgacccggagtggacgcagcgcatcgtcgacctcatgaaggcctgcgacgacgccatcccggatccggagcgcgagacggacaagccgttcctcatgccgatcgaggacatcttcacgatcaccggccgcggcaccgtcgtcacgggccgtgtcgagcgtggcatcctcaacgtcaacgaggaggtcgagatcctgggtatctgcgagaactcccagaagacgaccgtcacctccatcgagatgttcaacaagttcctcgacacggccgaggccggcgacaacgccgccctgctgctccgtggcctgaagcgcgaggacgtcgagcgtggccagatcgtggccaagccgggcgcctacacgccgcacaccgagttcgagggctccgtgtacatcctctccaaggacgagggtggccgccacacgccgttcttcgacaactaccgtccgcagttctacttccggacgaccgacgtcaccggcgtcgtcaagctgccggaggg

SEQ ID NO: 35 - DNA, 689 bp, Corynebacterium cervicis
  NCTC 10604
ggctcagacccgcgagcacgttctgcttgctcgccaggttggcgttccgacgatcctggttgccctcaacaaggccgatatggtcgacgatgaggaaatgctggagctcgttgaggaagagtgccgcgacctgctcgagtcccaggacttcgatcgtgacgccccgatcatccaggtttccgcgctgaaggctctcgaaggtgatccgcagtgggttgctaaggtcgaggagctcatggaggcagtcgacaccttcgtgccgactcctgagcgcgacatggacaagccgttcctcatgccgatcgaagacgtcttcaccatcaccggccgtggcaccgttgttaccggtcgtgttgagcgtggcaagctcccgatcaactctgaggttgaaatcctcggtatccgcgaaccgcagaagaccaccgttaccggtatcgagatgttccacaagtccatggatgaagcatgggcaggcgagaactgtggtctcctcctgcgtggcaccaagcgcgatgaggttgagcgcggtcaggtcgttgccgttcccggttcgatcaccccgcacaccaacttcaccggacaggtctacatcctcaagaaggaagaaggcggtcgtcacaacccgttcttctcgaactaccgtccgcagttctacttccgcaccacggacgtgaccggcgtcatcaccc

SEQ ID NO: 36 - DNA, 804 bp, Corynebacterium flavescens
  ref <308>: DATABASE ACCESSION NUMBER: ATCC 10340
ggttgttgctgcaaccgatggtcctatgccgcagacccgcgagcacgttcttctggctcgccaggttggcgttccttacatcctcgttgctcttaacaagtgcgacatggttgatgatgaggaaatcatcgagctcgttgagatggaaatccgcgaactgctcgctgagcaggactacgacgaggatgcccccatcatccacatctccgctctcaaggctcttgagggtgacgagaagtgggtacaggccatcgtcgacctcatgcaggcctgcgatgactccattccggatccggagcgcgagaccgacaagcccttcctcatgcctatcgaggacatcttcaccatcaccggccgcggtaccgttgttaccggccgtgttgagcgtggcgttttgaaggtcaacgaggatgttgagatcatcggcatcaaggagaagtccatctccaccaccgttaccggtatcgaaatgttccgcaagatgatggactacaccgaggctggcgacaactgtggtctgcttctgcgtggtaccaagcgtgaagaggtcgagcgcggccaggttgttatcaagccgggcgcctacaccccccacaccaagttcgagggttccgtctacgtcctcaagaaggaagagggcggccgccacaccccgttcatggacaactaccgtccgcagttctacttccgtaccactgacgtgaccggcgttgttcacctgcctgagggcaccgagatggtcatgcctggcgacaacgttgatatgaccgttgagctcatccagcccgtcgctaggatgagggc

SEQ ID NO: 37 - DNA, 692 bp, Corynebacterium kutscheri
  ref <308>: DATABASE ACCESSION NUMBER: ATCC 15677
tgcctcagacccgtgagcacgttcttcttgctcgccaggttggcgttccttacatcctcgttgctcttaacaagtgcgacatggttgacgatgaggaaatcatcgagctcgttgagatggaagttcgcgagcttcttgctgagcaggagtacgatgaagaggctccaatcatccacatctctgctttgaaggctcttgagggcgacgagaagtggactcaggccatcatcgacctcatgcaggcttgtgatgactccatcccagatccagagcgtgagaccgacaagccattcctcatgcctatcgaggatatcttcaccatcaccggtcgtggcaccgttgttaccggtcgtgttgagcgcggttccttgaaggtgaatgaggacgtcgagatcatcggcatcaaggagaagtccaccactactaccgttaccggtatcgaaatgttccgtaagcttcttgattacaccgaagctggcgataactgtggtctgcttcttcgtggtatcaagcgcgaagacgttgagcgtggtcaggttgttgttaagccaggcgcttacacacctcacaccgagttcgagggctctgtttacgttctttccaaggacgagggcggccgccacaccccattcttcgacaactaccgtccacagttctacttccgcaccactgacgttaccggtgttgtgaag

SEQ ID NO: 38 - DNA, 797 bp, Corynebacterium minutissimum
  ref <308>: DATABASE ACCESSION NUMBER: ATCC 23348
cctggttgttgctgcaaccgatggcccgatgccgcagacccgcgagcacgttcttctggcccgccaggttggcgttccgtacatcctcgttgcactgaacaagtgtgacatggttgacgatgaggaaatcatcgagctcgttgagatggagatccgtgagctgctcgctgagcaggactacgacgaggaagctccgatcgttcacatctccgctctgaaggctcttgagggcgacgagaagtgggcacagtccatcgttgacctgatgcaggcttgcgatgactccatcccggatccggagcgcgagctggacaagccgttcctgatgccgatcgaggacatcttcaccattaccggccgcggtaccgttgttaccggccgtgttgagcgtggctccctgaacgttaacgaggacatcgagatcatcggtatcaaggacaagtccatgtccaccaccgttaccggtatcgagatgttccgcaagatgatggactacaccgaggctggcgacaactgtggtctgcttctgcgtggtaccaagcgtgaagaggttgagcgtggccaggtttgcatcaagccgggcgcttacaccccgcacaccaagttcgagggttccgtctacgtcctgaagaaggaagagggcggccgccacaccccgttcatggacaactaccgtccgcagttctacttccgcaccaccgacgtcaccggtgtcatcaagctgccggagggcaccgagatggtcatgccgggcgacaacgttgagatgtccgtagagctgatccagccggtcgcta

SEQ ID NO: 39 - DNA, 702 bp, Corynebacterium mycetoides
  ref <308>: DATABASE ACCESSION NUMBER: ATCC 21134
gccgcagacccgcgagcacgttcttctggcccgccaggtcggcgtcccctacatcctcgttgcgctgaacaagtgcgacatggttgatgatgaggagatcatcgagctcgtggagatggaggtccgtgagctgctcggcgagcaggactacgacgaggacgcccccatcatccacatctccgctctgaaggctctcgagggcgacgagaagtgggttcagtccgtgctcgacctcatgcaggcgtgcgacgactccatcccggatccggtccgcgagaccgaccgcgacttcctgatgccgatcgaggacatcttcaccatctccggccgcggcaccgtggttaccggtcgtgtggagcgcggcgtgctcaacctcaacgacgaggtcgagatcatcggcatccgcgacaagtcccagaagaccaccgtcacctccatcgagatgttcaacaagctgctcgataccgctgaggcaggcgacaacgcggctctgctgctccgcggtctgaagcgcgaggacgtcgagcgtggccaggttgtcatcaagccgggcgcctacaccccgcacaccaagttcgagggttccgtctacgtcctgtccaaggacgagggcggccgccacaccccgttcttcgacaactaccgtccgcagttctacttccgcaccaccgacgtgaccggtgttgtgaagctgccggaggg

SEQ ID NO: 40 - DNA, 674 bp, Corynebacterium pseudogenitalium
  ref <308>: DATABASE ACCESSION NUMBER: ATCC 33038
gctcgccaggttggcgttccttacatcctcgttgcgctgaacaagtgcgacatggttgatgatgaggaaatcatcgagctcgttgagatggagatccgtgagctgctcgcagagcaggattacgatgaggaagctcctatcgttcacatctccgctctgaaggccctcgagggcgatgacaagtgggtacagtccgtcgttgatctgatggaagcctgcgacaactccatcccggatccggagcgcgctaccgaccagccgttcctgatgcctatcgaggacatcttcaccattaccggccgcggtaccgttgttaccggccgtgttgagcgtggccgtctgaacgtcaacgaggacgttgagatcatcggtatccaggagaagtcccagaccaccaccgttaccggtatcgagatgttccgcaagatgatggactacaccgaggctggcgacaactgtggtctgcttctgcgtggtaccaagcgtgaggacgttgagcgtggccaggttgttatcaagccgggcgcttacaccccgcacaccaagttcgagggctccgtctacgtcctgaagaaggaagagggcggccgccacaccccgttcatgaacaactaccgtccgcagttctacttccgtaccacggacgttaccggtgttgttcacctgccagaggg

SEQ ID NO: 41 - DNA, 694 bp, Corynebacterium renale
  ref <308>: DATABASE ACCESSION NUMBER: ATCC 19412
tgcctcagacccgtgagcacgttctgcttgctcgtcaggtcggcgttccttacatcctcgttgcactgaacaagtgcgacatggtcgacgacgaagaaatcatcgagctcgtcgagatggaaatccgtgaactgctcgcagagcaggactacgatgaggaagctcctatcgttcacatctccgctctgggcgccctgaacggcgagcagaagtgggttgactccatcgtcgaactgatggaagcttgcgacaactccatcccagacccagttcgcgacatcgaccacccattcctgatgcctatcgaggacatcttcaccattaccggtcgcggtaccgttgttaccggccgtgtcgagcgtggccgtctcaacgtcaacgaagaagttgagatcatcggtatcaaggacaagtcccagaagaccaccgtcaccggtatcgagatgttccgcaagatgctggactacaccgaagctggcgacaactgtggtctgctgctccgcggcatcggccgtgaggatgtcgagcgtggccaggttatcatcaagccaggcgcttacacccctcactctgagttcgagggctctgtctacgtcctgtccaaggacgagggtggccgccacaccccattcttcgacaactaccgtccacagttctacttccgcaccaccgacgtgaccggcgttgtgcacct

SEQ ID NO: 42 - DNA, 687 bp, Corynebacterium ulcerans
  NCTC 8665
gccgcagacccgcgagcacgttctgctggctcgccaggttggcgttccktacatcctsgttgcactgaacaagtgcgacatggttgacgatgaggarctcctsgagctcgtcgagatggaggtccgcgagctgctggctgagcaggactacgacgaggaagctccgrtcgttcacatctccgcwctgaacgccctggacggcgacsagaagtgggctvactccatcctcgagctgatgcaggcttgcgacgagtccatcccggatccggagcgcgagaccgacaagccgttcctgatgccgattgaggacatcttcaccattaccggtcgcggyaccgttgttaccggccgtgttgagcgtggcdtcctgaacgtsaacgacgasgttgagatcatgggyatccgggagaagtcccagaagaccaccgtyacckscatcgagatgttcaacaagmtgmtggacwccgcagaggctggcgacaacgctgswctgctgctgcgtggtmtsaagcgtgaggacgttgagcgtggccagatcatcgytaagccgggcgcktacaccccgcacaccgagttcgagggctccgtctacgtcctgtccaaggacgagggcggccgccacaccccgttcttcgacaactaccgtccgcagttctacttccgcaccaccgacgtsaccggtgttgt

SEQ ID NO: 43 - DNA, 778 bp, Corynebacterium urealyticum
  ref <308>: DATABASE ACCESSION NUMBER: ATCC 43042
ctggttgttgctgcaaccgatggcccgatgccgcagacccgtgagcacgttctgctggctcgccaggttggcgttccgtacatcctcgttgcactgaacaagtgcgacatggttgacgatgaggagctcctcgagctcgtcgagatggaggtccgcgagcttctggctgagcaggactacgacgaggaggctccggtcgtcccgatctccgcactgggcgccctggacggcgatcagaagtgggtcgactccatcctcgagctcatgaaggcttgcgacgagtccatcccggacccggagcgcgagaccgacaagccgttcctgatgccggttgaggacatcttcaccattaccggtcgcggcaccgtcgttaccggccgtgttgagcgtggcgtcctgaacctgaacgacgaggtcgagatcctgggcatccgcgagaagtccaccaagaccaccgtcacctccatcgagatgttcaacaagctgctggacaccgcagaggctggcgacaacgctgcactgctgctgcgtggtctgaagcgtgaggacgtcgagcgaggccagatcatcgctaagccgggcgcttacaccccgcacaccgagttcgagggctccgtctacgtcctgtccaaggacgagggcggccgtcacaccccgttcttcgacaactaccgtccgcagttctacttccgtaccaccgacgtcaccggtgtcgttaccctgccagagggcaccgacatggtcatgccgggcgacaacgttgagatgagcgtcaagc

SEQ ID NO: 44 - DNA, 703 bp, Corynebacterium xerosis
  ref <308>: DATABASE ACCESSION NUMBER: ATCC 373
cgcagacccgtgagcacgtcctcctggcccgccaggtcggcgtcccctacatcctcgtcgccctgaacaagtgcgacatggtcgacgatgaggagatcatcgagctcgtggagatggaggtgcgtgagcttctcgccgagcaggactacgacgaggaggccccgatcgtgcacatctccgccctgggcgccctcaatggcgaagagaagtgggtcgactccatcgtcgagctcatgaacgccgtcgacgagaacgttccggacccggtccgcgagaccgacaagccgttcctgatgcccgtcgaggacatcttcaccatcaccggccgcggcaccgtcgccaccggtcgcgtggagcgcggcaccctgaaggtcaacgacgaggtcgagatcctgggcatccaggagaagtcccagaccaccaccgtcaccggcatcgagatgttccgcaagctgctggactccgccgaggccggcgacaactgtggcctgctgctccgcggcatcaagcgcgaggacatcgagcgcggccagatcatcgcgaagccgggcgcctacaccccgcacaccgagttcgagggctccgtctacatcctggccaaggacgagggcggccgccacaccccgttcttcgacaactaccgtccgcagttctacttccgcaccaccgacgtcaccggcgtcgtgaagctgccggagggcac

SEQ ID NO: 45 - DNA, 832 bp, Coxiella burnetii
  strain Nine Mile phase II
ggagcgatattggtggtgagcgcagcggacggcccgatgccgcaaacgcgggaacacattgtattggcgaagcaagtgggtgttccgaacatagtggtttacttgaacaaagcggacatggtggatgacaaagagctgttggaattagtggaaatggaagtgagggatttattgaacagttatgatttccctggggatgagacgccgataatagtggggtcagcgttaaaggcgttagaaggtgacaagagtgaggttggggagccatcgataatcaaattagtggaaacgatggacacgtacttcccgcagccggagcgagcgatagacaaaccgtttttaatgccgatcgaagatgtgttttcgatatcgggccgagggacggtggtgacgggacgcgtagagcgagggatcatcaaagtgggcgacgagatagagattgtggggatcaaggacacgacgaagacgacgtgcacgggcgttgagatgtttcgcaaattattggatgaaggtcaagcgggtgacaacgtaggaattttattgagagggacgaaacgcgaagaagtggagcgtggtcaagtattggcgaaaccgggatcgatcacgccacacaagaaatttgaggcggagatttatgtgttgtcgaaggaagaagggggacgccacacaccgtttttacaaggctatcgaccgcaattttatttccgcacgacggacgtgacgggccagttattgagtttaccggaggggatagagatggtgatgccgggagataacgtgaaagtgacggttgaattgattgcgccggtagcgatggatgaagggctacgat

SEQ ID NO: 46 - DNA, 816 bp, Edwardsiella hoshinae
  ref <308>: DATABASE ACCESSION NUMBER: ATCC 33379
ggcgctatcctggttgttgctgcgactgacggcccgatgccgcagacccgtgagcacatcctgctgggtcgccaggtaggcgttccgtacatcatcgtgttcctgaacaagtgcgacatggttgatgacgaagagctgctggaactggttgagatggaagttcgcgaactgctgtctcagtacgatttcccgggcgacgatacgccggtaatccgcggttctgcgctgaaagcgctggaaggcgaagccgagtgggaagcgaagatcatcgaactggctgaaacgctggactcctacattccggaacctgagcgtgacatcgacaagccgttcctgctgccgatcgaagacgtattctcaatctctggtcgtggtaccgttgttaccggtcgtgtagagcgcggtatcatcaaggtaggcgacgaagttgaaatcgtaggtatcaagccgaccaccaagactacctgtactggcgttgaaatgttccgcaaactgctggacgaaggccgtgctggtgagaacgtaggtgttctgctgcgtggtaccaagcgtgacgaaatcgaacgtggtcaggtactggctaagccgggcaccatcactccgcacaccaagttcgaatcagaagtgtacatcctgagcaaggatgaaggcggccgtcatactccgttcttcaaaggttaccgtccgcagttctacttccgtaccactgacgtgactggcaccatcgaactgccggaaggcgtagagatggtaatgccgggcgacaacatcaagatggttgttaccctgatccacccgatcgccatggacgatggt

SEQ ID NO: 47 - DNA, 821 bp, Edwardsiella tarda
  ref <308>: DATABASE ACCESSION NUMBER: ATCC 15947
ggcgcgatcctggttgttgctgcgactgacggcccgatgccgcagacccgtgagcacatcctgttgggtcgccaggtaggcgttccgtacatcatcgtgttcctgaacaagtgcgacatggttgatgacgaagagctgctggaactggttgagatggaagttcgcgaactgctgtctcagtacgacttcccgggcgacgacacgccggtaatccgcggttctgcgctgaaagcgctggaaggcgaagccgagtgggaagcgaagatcatcgaactggctgaaactctggactcctacatcccggaacctgagcgtgacatcgacaagccgttcctgctgccgatcgaagacgtattctctatctctggccgtggtaccgttgttaccggtcgtgtagagcgcggtatcatcaaggtaggcgacgaagttgaaatcgttggtatcaagccgaccaccaagaccacctgtactggcgttgaaatgttccgcaaactgctggacgaaggccgtgctggtgagaacgttggtgttctgctgcgtggtactaagcgtgacgaaatcgaacgtggtcaggtactggctaagccgggcaccatcactccgcacaccaagttcgaatctgaagtgtacatcctgagcaaggatgaaggcggccgtcatactccgttcttcaaaggctaccgtccgcagttctacttccgtactactgacgtgactggtaccatcgaactgccggaaggcgtagagatggtaatgccgggcgacaacatcaagatggttgttaccctgatccacccgatcgccatggacgatggtctgcg

SEQ ID NO: 48 - DNA, 830 bp, Eikenella corrodens
  ref <308>: DATABASE ACCESSION NUMBER: ATCC 23834
cggtgccatcctggtggtatccgctgctgacggccccatgcctcagactcgcgaacacatcctgttggctcgtcaggtaggtgtaccctacatcctcgtattcatgaacaaatgcgacatggtagatgatgccgagctgcttgagttggttgagatggaaatccgcgacctgctctccagctatgacttccctggtgacgactgcccgatcgtacaaggttccgctctcaaagccctcgaaggcgatgccggttacaaagaaaaaatcttcgaactagctgctgctttggatagctacatccccactcctcaacgtgctgtagacaaacccttcctgttgccgatcgaagacgtattctctatctccggccgtggtaccgtagtaaccggtcgtgtagagcgcggcatcatcaaagtaggtgaagagatcgaaatcgttggtctgaagcccactcagaaaactacctgtactggcgtggaaatgttccgcaaactgctggacgaaggtcaggccggtgacaacgtaggcgtactgctgcgcggtaccaaacgtgaagaagttgagcgtggtcaagtattggctaaacccggcaccatcactccgcacaccaagttcaaagccgaagtatacgtattgagcaaagaagaaggtggtcgtcacaccccgttctttgccaactaccgtccacagttctacttccgtactactgacgtaaccggtgctgtagagctggagcctggtgtagaaatggttatgcctggtgagaacgtaaccatcaccgtagaactgattgctccgattgctatggaagaaggtctgcgctttgcga

SEQ ID NO: 49 - DNA, 808 bp, Enterobacter aerogenes
  ref <308>: DATABASE ACCESSION NUMBER: ATCC 13048
ggcgcgatcctggttgttgctgcgactgacggcccgatgccgcagactcgtgagcacatcctgctgggtcgtcaggtaggcgttccgtacatcatcgtgttcctgaacaaatgcgacatggttgatgacgaagagctgctggaactggttgagatggaagttcgtgaactgctgtctcagtacgatttcccgggcgacgacactccgatcgttcgtggttctgctctgaaagcgctggaaggcgacgcagagtgggaagcgaaaatcatcgaactggctggcttcctggattcttacatcccrgaaccagagcgtgcgattgacaagccgttcctgctgccgatcgaagacgtattctccatctccggtcgtggtaccgttgttaccggtcgtgtagagcgcggtatcatcaaagttggtgaagaagttgaaatcgttggtatcaaagacaccgcgaaaaccacctgtactggcgttgaaatgttccgcaaactgctggacgaaggccgtgctggtgagaacgtaggygttctgctgcgtggtatcaaacgtgaagaaatcgaacgtggtcaggtactggctaagccgggcagcatcaagccgcacaccaagttcgaatctgaagtgtacatcctgtccaaagacgaaggcggccgtcatactccgttcttcaaaggctaccgtccgcagttctacttccgtactactgacgtgactggtaccatcgaactgccggaaggcgtagagrtggtaatgccgggcgacaacatcaaaatggttgttaccctgatccacccgatcgcgatgg

SEQ ID NO: 50 - DNA, 828 bp, Enterobacter agglomerans
  ref <308>: DATABASE ACCESSION NUMBER: ATCC 27989
cggcgcgatcctggttgttgctgcgactgacggcccgatgccgcagactcgtgagcacatcctgctgggtcgtcaggtaggcgttccgtacatcatcgtgttcctgaacaaatgtgacatggttgatgacgaagagctgctggaactggttgaaatggaagttcgtgaacttctgtctcagtacgatttcccgggcgacgatactccgatcgttcgtggttctgctctgaaagcgctggaaggcgamgcwgagtgggaagcgaaaatcatcgarctggctggccacctggatacctatatcccggaaccagagcgtgcgattgacaagccgttcctgctgccgatcgaagacgtattctccatctccggtcgcggtaccgttgttaccggtcgtgtagagcgcggtatcatyaaagtgggcgaagaagttgaaatcgttggtatcaaagatacygcgaaatcaacctgtaccggcgttgaaatgttccgcaaactgctggacgaaggccgtgctggtgagaacgttggtgttctgctgcgtggtatcaaacgtgaagaaatcgaacgtggtcaggtactggctaagccgggcaccatcaagccgcacaccaagttcgaatctgaagtgtacattctgtccaaagatgaaggcggtcgtcacactccgttcttcaaaggctaccgtccscagttctacttccgtacaactgacgtgactggcaccatcgaactgccggaaggcgtagagatggtaatgccgggcgacaacatcaaaatggttgttaccctgatccacccgatcgcgatggacgacggtctgcgttcgca

SEQ ID NO: 51 - DNA, 825 bp, Enterobacter amnigenus
  ref <308>: DATABASE ACCESSION NUMBER: ATCC 33072
tggcgcgatcctggttgttgctgcaactgatggccctatgccacagacgcgtgagcacatcctgctgggtcgtcaggtaggcgttccttacatcatcgtgttcctgaacaaatgcgacatggttgatgacgaagagctgctggaactggtagaaatggaagttcgtgaacttctgtctcagtacgatttcccaggtgatgacactccaatcatccgtggttctgctctgaaagcgctggaaggcgaagcagagtgggaagctaaaatcgttgagctggctggctacctggattcttacatcccggaaccagaacgtgctatcgataagccattcctgctgccaatcgaagacgtattctctatctccggccgtggtactgttgtaaccggtcgtgtagagcgcggtatcgttaaagttggcgaagaagttgaaatcgttggtatcaaagagactgctaagtctacctgtactggcgttgaaatgttccgcaaactgctggacgaaggccgtgctggtgagaacgttggtgttctgctgcgtggtatcaaacgtgaagaaatcgaacgtggtcaggtactggctaagccaggctcaatcaagccgcacaccaaattcgaatctgaagtttatattctgtccaaagatgaaggcggccgtcatactccgttcttcaaaggctaccgtccacagttctacttccgtacaactgacgtgaccggcaccatcgaactgccagaaggcgtagagatggtaatgccaggcgacaacattcagatggttgttaccctgatccacccaatcgcgatggatgacggtctgcgttt

SEQ ID NO: 52 - DNA, 822 bp, Enterobacter asburiae
  ref <308>: DATABASE ACCESSION NUMBER: ATCC 35953
cggcgcgatcctggttgttgctgcgactgacggcccaatgcctcagactcgtgagcacatcctgctgggtcgtcaggtaggcgttcctttcatcatcgtgttcctgaacaaatgcgacatggttgatgacgaagagctgctggaactggtagagatggaagttcgtgaactgctgtctcagtacgatttcccgggcgacgatactccaatcgttcgtggttctgctctgaaagcgctggaaggcgacgcagagtgggaagcgaaaatcatcgaactggctggcttcctggattcttacatcccagaaccagagcgtgcgattgacaagccattcctgctgccaatcgaagacgtattctccatctccggtcgtggtaccgttgttaccggtcgtgtagagcgcggtatcatcaaagttggcgaagaagttgaaatcgttggtatcaaagagactgctaagtctacctgtactggcgttgaaatgttccgcaaactgctggacgaaggccgtgctggtgagaacgttggtgttctgctgcgtggtatcaaacgtgaagaaatcgaacgtggtcaggttctggcgaagccaggctcaatcaagccacacaccaagttcgaatctgaagtgtacatcctgtccaaagacgaaggcggccgtcatactccgttcttcaaaggctaccgtccacagttctacttccgtacaactgacgtgaccggtaccatcgaactgccagaaggcgttgagatggtaatgccaggcgacaacatcaagatggttgtgactctgatccacccaatcgcgatggacgacggtctgcg

SEQ ID NO: 53 - DNA, 826 bp, Enterobacter cancerogenus
  ref <308>: DATABASE ACCESSION NUMBER: ATCC 35317
cggcgcgatcctggttgttgctgcgactgacggcccaatgcctcagactcgtgagcacatcctgctgggtcgtcaggtaggcgttccttacatcatcgtgttcctgaacaagtgcgacatggttgatgacgaagagctgctggaactggtagaaatggaagttcgtgaactgctgtctcagtacgatttcccaggcgacgacactccaatcgttcgtggttccgcgctgaaagcgctggaaggcgaagctgagtgggaagcaaaaatcatcgaactggctggcttcctggattcttacatcccagaaccagagcgtgcgattgacaagccattcctgctgccaatcgaagacgtattctccatctccggtcgtggtaccgttgttaccggtcgtgtagagcgcggtatcatcaaagttggtgaagaagttgaaatcgttggtatcaaagatactgckaaatctacctgtactggcgttgaaatgttccgcaaactgctggacgaaggccgtgctggtgagaacgttggtgttctgctgcgtggtatcaaacgcgaagaaatcgaacgtggtcaggttctggcgaagccaggctcaatcaagccacacaccaagttcgaatctgaagtgtacatcctgtccaaagacgaaggcggccgtcatactccgttcttcaaaggctaccgtccacagttctacttccgtacaactgacgtgaccggtaccatcgaactgccagaaggcgtagagatggtaatgccaggcgacaacatcaagatggttgtgacgctgatccacccaatcgcgatggacgacggtctgcgtttc

SEQ ID NO: 54 - DNA, 806 bp, Enterobacter cloacae
  ref <308>: DATABASE ACCESSION NUMBER: ATCC 13047
gatcctggtagtagctgcgactgacggcccaatgcctcagactcgtgagcacatcctgctgggtcgtcaggtaggcgttccttacatcatcgtgttcctgaacaaatgcgacatggttgatgacgaagagctgctggaactggtagagatggaagttcgtgaactgctgtctcagtacgatttcccaggcgacgataccccaatcgttcgtggttctgctctgaaagcgctggaaggcgacgcagagtgggaagmgaaaatcatcgaactggctggctacctggattcttacatcccagaaccagagcgtgcgattgayaagccattcctgctgccaatcgaagacgtattctccatctccggtcgtggtaccgttgttaccggtcgtgtagagcgcggtatcatcaaagtgggtgaagaagttgaaatcgttggtatcaaagagactgcgaagtctacctgtactggcgttgaaatgttccgcaaactgctggacgaaggccgtgctggtgagaacgttggtgttctgctgcgtggtatcaaacgtgaagaaatcgaacgtggtcaggttctggcgaagccaggctcaatcaagccacacaccaagttcgaatctgaagtgtacatcctgtccaaagacgaaggcggccgtcatactccgttcttcaaaggctaccgtccacagttctacttccgtacaactgacgtgaccggtaccatcgaactgccagaaggcgtagaggtggtaatgccaggcgacaacatcaagatggttgtgactctgatccacccaatcgcgatggacg

SEQ ID NO: 55 - DNA, 826 bp, Enterobacter gergoviae
  ref <308>: DATABASE ACCESSION NUMBER: ATCC 33028
cggcgcgatcctggttgttgctgcgactgacggcccgatgccgcagacccgtgagcacatcctgctgggtcgtcaggtaggcgttccgtacatcatcgtgttcctgaacaagtgcgacatggttgatgacgaagagctgctggaactggtagagatggaagttcgtgaactgctgtctcagtacgatttcccgggcgacgacaccccgatcgttcgcggttctgcgctgaaagcgctggaaggcgacgcagagtgggaagcgaaaatcatcgaactggctggccacctggatacctayatcccggaaccagagcgtgcgattgacaagccgttcctgctgccgatcgaagacgtattctccatttccggtcgtggtaccgttgttaccggtcgtgtagagcgcggtatcatcaaggttggtgaagaagttgaaatcgttggtatcaaagacaccgcgaaaaccacctgtactggcgttgaaatgttccgcaaactgctggacgaaggccgtgctggtgagaacgtcggcgttctgctgcgtggtatcaagcgtgaagaaatcgaacgtggtcaggtactggctaagccgggctccatcaagccgcacaccaagttcgaatctgaagtgtacatcctgtccaaagacgaaggcggccgtcacactccgttcttcaaaggctaccgtccgcagttctacttccgtacaactgacgtgactggcaccatcgaactgccggaaggcgtagagatggtaatgccgggcgacaacatcaagatggttgttaccctgatccacccgatcgcgatggacgacggtctgcgtttc

SEQ ID NO: 56 - DNA, 829 bp, Enterobacter hormaechei
  ref <308>: DATABASE ACCESSION NUMBER: ATCC 49162
ggcgcgatcctggttgttgctgcgactgacggccctatgcctcagacccgtgagcacatcctgctgggtcgtcaggtaggcgttccttacatcatcgtgttcctgaacaaatgcgacatggttgatgacgaagagctgctggaactggtagagatggaagttcgtgaactgctgtctcagtacgatttcccaggcgacgacaccccaatcgttcgtggttccgcgctgaaagcgctggaaggcgamgcagagtgggaagmgaaaatcatcgarctggctggcttcctggattcttacatcccagaaccagagcgtgcgattgacaagccattcctgctgccaatcgaagacgtattctccatctccggtcgtggtaccgttgttaccggtcgtgtwgagcgcggtatcatcaaagtaggtgaagaagttgaaatcgttggtatcaaagagactgcgaagtctacctgtactggcgttgaaatgttccgcaaactgctggacgaaggccgtgctggtgagaacgttggtgttctgctgcgtggtatcaaacgtgaagaaatcgaacgtggtcaggttctggcgaagccaggctcaatcaagccacacaccaagttcgaatctgaagtgtacattctgtccaaagacgaaggcggccgtcatactccgttcttcaaaggctaccgtccacagttctacttccgtacaactgacgtgaccggtaccatcgaactgccagaaggcgtagagatggtaatgccaggcgacaacatcaagatggttgtgacgctgatccacccaatcgcgatggacgacggtctgcgtttcgcaa

SEQ ID NO: 57 - DNA, 831 bp, Enterobacter sakazakii
  ref <308>: DATABASE ACCESSION NUMBER: ATCC 29544
ggcgctatcctggttgttgctgcgactgacggcccgatgccgcagacccgtgagcacatcctgctgggtcgtcaggtaggcgttccgtacatcatcgtgttcctgaacaaatgcgacatggttgatgacgaagagctgctggaactggttgagatggaagtgcgcgagctgctgtctcagtacgacttcccgggcgacgacaccccgatcgttcgtggttctgctctgaaagcgctggaaggcgacgctgagtgggaagcgaaaatcatcgagctggcaggtcacctggattcctacatcccggaaccggagcgtgcgattgacaagccgttcctgctgccgatcgaagacgtattctccatctcyggtcgtggtaccgttgttaccggtcgtgtagagcgcggtatcatcaaggttggtgaagaagttgaaatcgtgggcatcaaagacaccgcgaaatccacctgtaccggcgttgaaatgttccgcaaactgctggacgaaggccgtgcgggcgagaacgtaggtgttctgctgcgtggtatcaaacgtgaagaaatcgaacgtggtcaggtactggctaagccgggctccatcaagccgcacaccaagttcgaatctgaagtgtacattctgtccaaagatgaaggcggccgtcacactccgttcttcaaaggctaccgtccgcagttctacttccgtacractgacgtgactggcaccatcgaactgccggaaggcgttgagatggtaatgccgggcgacaacatcaaaatggttgttaccctgatccacccgatcgcgatggacgacggtctgcgtttcgcaatc

SEQ ID NO: 58 - DNA, 835 bp, Enterococcus casseliflavus
  ref <308>: DATABASE ACCESSION NUMBER: ATCC 25788
cggcgcgatcttagtagtatctgctgctgatggtcctatgcctcaaacacgtgaacacatcttgttatcacgtaacgttggtgtaccatacatcgttgttttcttaaacaaaatggatatggttgatgacgaagaattactagaattagttgaaatggaagttcgtgacttattgtcagaatatgacttcccaggcgacgatgttcctgtaatcgctggttctgctttgaaagctcytgaaggcgatgcttcatacgaagaaaaaatcatggaattaatggctgcagttgacgaatacgttccaactccagaacgtgacactgacaaaccattcatgatgccagtcgaagacgtattctcaatcactggacgtggtactgttgctacaggccgtgttgaacgtggacaagttcgcgttggtgacgaagttgaaatcgttggtattgctgaagaaactgctaaaacaactgtaactggtgttgaaatgttccgtaaattgttagactatgctgaagcaggggataacattggtgcattgctacgtggtgttgctcgtgaagacatccaacgtggacaagtattggctaaagctggtacaatcacacctcatacaaaatttaaagctgaagtttacgttttaacaaaagaagaaggtggacgtcacacaccattcttcactaactaccgtcctcagttctacttccgtacaactgacgtaactggtgttgttgaattaccagaaggaactgaaatggttatgcctggtgataacgtaacaatcgacgttgaattgatccacccaatcgctatcgaagacggaactcgtttctcaatt

SEQ ID NO: 59 - DNA, 826 bp, Enterococcus cecorum
  ref <308>: DATABASE ACCESSION NUMBER: ATCC 43198
ggtgctatcttagtagtatctgctgctgatggtcctatgccacaaactcgtgaacacattcttttatcacgtaacgttggtgttccatacatcgttgttttcttaaacaaagttgatatggttgacgacgaagaattattagaattagttgaaatggaagtacgtgacttattaactgaatacgacttcccaggagacgatgttcctgtaatcgctggttctgcattaaaagctttagaaggcgacccatcttacgaagaaaaaatcttagaattaatggctgcagttgacgaatacatcccaactccagaacgtgacaacgataaaccattcatgatgccagtcgaagacgtattttcaatcactggtcgtggtactgttgctacaggtcgtgttgaacgtggacaagtacgtgttggtgacgaagttgaaatagttggtatccatgatgaaatttctaaaacaacagttactggtgttgaaatgttccgtaaattattagattacgctgaagctggagacaacatcggtgcattattacgtggtgtggctcgtgaagatatccaacgtggtcaagtattagctaaaccaggttcaatcactccacatacaaaattcactgctgaagtgtacgttttaactaaagaagaaggtggacgtcatactccattcttcactaactaccgtccacaattctacttccgtacaactgacgttacaggtgtagttaacttaccagaaggtactgaaatggttatgcctggtgataacgtaactatggaagttgaattaatccacccaatcgctatcgaagacggaactcgtt

SEQ ID NO: 60 - DNA, 835 bp, Enterococcus dispar
  ref <308>: DATABASE ACCESSION NUMBER: ATCC 51266
cggcgcgatcttggtagtatctgctgctgatggtcctatgcctcaaactcgtgaacacatcctattgtcacgtaacgttggtgttccttacatcgtcgttttcttgaacaaaatggacatggttgatgacgaagaattattagaattagttgaaatggaagttcgtgacttattgtcagaatacgacttcccaggcgacgacactccagttatcgcaggttcagctttgaaagccttagaaggcgacgcttcatatgaagaaaaaatcttagaattaatggctgcagttgacgaatatatcccaactccagttcgtgatactgacaaaccattcatgatgccagtcgaagatgtattctcaatcactggtcgtggtactgttgcaactggtcgtgttgaacgtggacaagttcgcgttggtgacgaagttgaaatcgtaggtatcgctgaagaaactgctaaaactactgtaacaggtgttgaaatgttccgtaaattgttggattacgctgaagctggcgacaacattggtgcattattacgtggtgtggctcgtgaagatatccaacgtggtcaagtattatcaaaaccaggttcaatcactccacatacaaaatttgcggcagaagtttacgttttaactaaagaagaaggtggacgtcatactccattcttcactaactaccgcccacaattctacttccgtacaactgacgtaacaggtgttgttgaattaccagaaggtactgaaatggttatgcctggcgataacgttactatggacgttgaattaatccacccaatcgcgatcgaagacggtactcgtttctcaatc

SEQ ID NO: 61 - DNA, 835 bp, Enterococcus durans
  ref <308>: DATABASE ACCESSION NUMBER: ATCC 19432
cggagctatcttagtagtttctgctgctgatggccctatgcctcaaactcgtgaacatatcctattatctcgtcaagttggtgttccttacatcgtygtattcttgaacaaagtagatatggtcgatgacgaagaattactagaattagttgaaatggaagttcgtgacttattaacagaatacgaattccctggtgacgatgttcctgtaatcgctggttcagctttgaaagctttagaaggcgacgcttcatacgaagaaaaaatccttgaattaatggctgcagttgacgaatatatcccaactccagaacgtgacaacgacaaaccattcatgatgccagttgaagatgtattctcratcactggtcgtggtactgttgctacaggtcgtgttgaacgtggacaagttcgcgttggtgacgttgtagatatcgttggtatcgcagaagaaacagctcaaacaacagttactggtgttgaaatgttccgtaaattattagrctacgctgaagctggagacaacattggtgctttactacgtggtgttgcacgtgaagacatccaacgtggacaagttttagctaaaccaggtacaatcackcctcatacaaaattctctgcagaagtatacgtgttgactaaagaagaaggtggacgtcatactccattcttcactaactaccgtccacaattctacttccgtacaactgacgtaacaggtgttgttgaattaccagaaggaactgaaatggttatgcctggcgacaacgtaacaatggaagttgaattaatccacccaatcgctatcgaaaatggtactaaattctcaatc

SEQ ID NO: 62 - DNA, 680 bp, Enterococcus faecalis
  strain R610
agtagtttctgctgctgatggtcctatgcctcaaacacgtgaacatatcttattatcacgtaacgttggtgtaccatacatcgttgtattcttaaacaaaatggatatggttgatgacgaagaattattagaattagtagaaatggaagttcgtgacttattatcagaatacgatttcccaggcgatgatgttccagttatcgcaggttctgctttgaaagctttagaaggcgacgagtcttatgaagaaaaaatcttagaattaatggctgcagttgacgaatatatcccaactccagaacgtgatactgacaaaccattcatgatgccagtcgaagacgtattctcaatcactggacgtggtactgttgctacaggccgtgttgaacgtggtgaagttcgcgttggtgacgaagttgaaatcgttggtattaaagacgaaacatctaaaacaactgttacaggtgttgaaatgttccgtaaattattagactacgctgaagcaggcgacaacatcggtgctttattacgtggtgtagcacgtgaagatatcgaacgtggacaagtattagctaaaccagctacaatcactccacacacaaaattcaaagctgaagtatacgtattatcaaaagaagaaggcggacgtcacactccattcttcactaactaccgtcctc

SEQ ID NO: 63 - DNA, 680 bp, Enterococcus faecalis; identical to SEQ ID NO: 62
  strain R487

SEQ ID NO: 64 - DNA, 685 bp, Enterococcus faecium
  strain R482
agtagtttctgctgctgacggcccaatgcctcaaactcgtgaacacatcctattgtctcgtcaagttggtgttccttacatcgttgtattcttgaacaaagtagacatggttgatgacgaagaattactagaattagttgaaatggaagttcgtgacctattaacagaatacgaattccctggtgacgatgttcctgtagttgctggatcagctttgaaagctctagaaggcgacgcttcatacgaagaaaaaattcttgaattaatggctgcagttgacgaatacatcccaactccagaacgtgacaacgacaaaccattcatgatgccagttgaagacgtgttctcaattactggacgtggtactgttgctacaggtcgtgttgaacgtggacaagttcgcgttggtgacgaagttgaagttgttggtattgctgaagaaacttcaaaaacaacagttactggtgttgaaatgttccgtaaattgttagactacgctgaagctggagacaacattggtgctttactacgtggtgttgcacgtgaagacatccaacgtggacaagttttagctaaaccaggtacaatcacacctcatacaaaattctctgcagaagtatacgtgttgacaaaagaagaaggtggacgtcatactccattcttcactaactaccgtcctcaattt

SEQ ID NO: 65 - DNA, 825 bp, Enterococcus flavescens
  ref <308>: DATABASE ACCESSION NUMBER: ATCC 49996
cggcgcgatcttagtagtatctgctgctgatggtcctaygcctcaaacacgtgaacacatcttgttatcacgtaacgttggtgtaccatacatcgttgttttcttaaacaaaatggatatggttgatgacgaagaattactagaattagttgaaatggaagttcgtgacttattgtcagaatatgacttcccaggcgacgatgttcctgtaatcgctggttctgctttgaaagctcttgaaggcgatgcttcatacgaagaaaaaatcatggaattaatggctgcagttgacgaatacgttccaactccagaacgtgacactgacaaaccattcatgatgccagtcgaagacgtattctcaatcactggacgtggtactgttgctacaggccgtgttgaacgtggacaagttcgcgttggtgacgaagttgaaatcgttggtattgctgaagaaactgctaaaacaactgtaactggtgttgaaatgttccgtaaattgttagactatgctgaagcaggggataacattggtgcattgctacgtggggttgctcgtgaagacatccaacgtggacaagtattagctaaagctggtacaatcacacctcatacaaaatttaaagctgaagtttacgttttaacaaaagaagaaggtggacgtcacactccattcttcactaactaccgtcctcagttctacttccgtacaactgacgtaactggtgttgttgaattaccagaaggaactgaaatggttatgcctggtgataamgtaacaatcgacgttgaattgatccacccaatcgctatcgaagacggaactcg

SEQ ID NO: 66 - DNA, 636 bp, Enterococcus gallinarum
  strain R420
tcctatgcctcaaactcgtgaacacatcttgttatcacgtaacgttggcgtaccatacatcgttgttttcttgaacaaaatggatatggttgatgacgaagaattgctagaattagttgaaatggaagttcgtgacctattgtctgagtatgacttcccaggcgacgatgttcctgtaatcgccggttctgctttgaaagctcttgaaggagatccttcatacgaagaaaaaatcatggaattgatggctgcagttgacgaatacgttccaactccagaacgtgatactgacaaaccattcatgatgccagtcgaagacgtattctcaatcactggacgtggtactgttgctacaggccgtgttgaacgtggacaagttcgcgttggtgatgaagtagaaatcgttggtattgctgacgaaactgctaaaacaactgtaacaggtgttgaaatgttccgtaaattgttagactatgctgaagcaggggataacattggtgcattgctacgtggggttgctcgtgaagacatccaacgtggacaagtattggctaaagctggtacaatcacacctcatacaaaattcaaagctgaagtttatgttttgacaaaagaagaaggtggacgtcacactcc

SEQ ID NO: 67 - DNA, 835 bp, Enterococcus hirae
  ref <308>: DATABASE ACCESSION NUMBER: ATCC 8043
cggagctatcttagtagtttctgctgctgatggtcctatgcctcaaactcgtgaacatatcctaytatctcgtcaagttggtgttccatacatcgttgtattcttgaacaaagtagatatggttgacgacgaagaattactagaattagttgaaatggaagttcgtgacttattaacagaatacgaattccctggtgacgatgttcctgtagttgctggtycagctttgaaagctttagaaggcgacgcttcatacgaagaaaaaatccttgaattgatggctgcagttgacgaatatatcccaactccagaacgtgacaacgacaaaccattcatgatgccagtcgaagacgtattctcaatcactggtcgtggtactgttgctacaggtcgtgttgaacgtggacaagttcgcgttggtgacgttgtagatatcgttggtatcgcagaagaaacagctcaaacaacagttactggtgttgaaatgttccgtaaattattagactacgctgaagctggagacaacattggtgctttactacgtggtgttgcacgtgaagacatccaacgtggacaagttttagctaaaccaggtacaatcacacctcatacaaaattctctgcagaagtatacgtgttgacaaaagaagaaggtggacgtcatactccattcttcactaactaccgtccacaattctacttccgtacractgacgtaacaggtgttgttgaattaccagaaggaactgaaatggttatgcctggcgacaacgtaacaatggaagttgaattaatccacccaatcgctatcgaaaacggtactaaattctcaatc

SEQ ID NO: 68 - DNA, 835 bp, Enterococcus mundtii
  ref <308>: DATABASE ACCESSION NUMBER: ATCC 43186
cggagcaatcttagttgtttctgctgctgacggccctatgcctcaaactcgtgaacacatcctattatctcgtcaagttggtgtaccatacatcgttgtattcttgaacaaagtagatatggttgatgacgaagaattacttgaattagttgaaatggaagttcgtgacctattaacagaatacgaattccctggtgacgatgttcctgtaatcgctggttcagctttaagagctttagaaggcgacgctkcatacgaagaaaaaattcttgaattgatggctgcagttgacgaatatatcccaactccagaacgtgataacgacaaaccattcatgatgccagttgaggacgtattctcaatcactggtcgtggtactgttgctacaggacgtgttgaacgtggacaagytcgtgttggtgacgttatcgatatcgttggtatcgcagaagaaacagctcaaacaactgtaactggtgttgaaatgttccgtaaattattagactacgctgaagcaggcgataacattggtgcgttactacgtggtgtttcacgtgaagacatccaacgtggtcaagttttagctaaaccaggtacaatcacacctcatacaaaattctctgcagaagtatacgtgttgactaaagaagaaggtggacgtcatactccattcttcactaactaccgtccacaattctacttcygtacgactgacgtaactrgtgttgtygaattaccagaaggaactgaaatggttatgcctggcgacaacgtaacaatggaagttgaattaatccacccaatcgctatcgaaaatggtactaaattctcaatc

SEQ ID NO: 69 - DNA, 836 bp, Enterococcus pseudoavium
  ref <308>: DATABASE ACCESSION NUMBER: ATCC 49372
cggagctatcttagtagtatctgctgctgatggccctatgcctcaaacacgtgaacacatcttgttatctcgtaacgttggtgttccttacatcgytgtattcttaaacaaaatggatatggttgatgacgaagaattactagaattagttgaaatggaagttcgtgacttattgtcagaatacgatttcccaggcgacgacactcyagttatcgctggttcagcyttgaaagctttagaaggcgacccttcatacraagaaaaaatcttagaattaatgsctgctgttgacgaatacatcccaacaccagttcgtgatactgacaaaccattcatgatgccagtcgaagacgtattctcaatcactggtcgtggtactgttgcaactggtcgtgttgaacgtggacaagttcgcgttggtgacgaagttgaaatcgtaggtatcgctgaagaaactgctaaaacaactgttacaggtgttgaaatgttccgtaaattgttagactacgctgaagcaggcgataacatcggtgcattattacgtggtgttgcacgtgaagacatccaacgtggacaagtattggctaaaccagcttcaatcactccacatacaaaattctctgcagaagtttacgttttaactaaagaagaaggcgggcgtcacactccgttcttcactaactaccgtcctcagttctacttccgtacaactgacgtaactggtgttgttgatctaccagaaggtactgaaatggtaatgcctggtgataacgtaactatggaagttgaattaatccacccaatcgcgatcgaagacggaactcgtttctctattc

SEQ ID NO: 70 - DNA, 835 bp, Enterococcus raffinosus
  ref <308>: DATABASE ACCESSION NUMBER: ATCC 49427
cggagctrtcttagtagtatctgctgctgatggccctatgcctcaaactcgtgaacacatcttgttatctcgtaacgttggtgttccttacatcgttgtattcttaaacaaaatggatatggttgacgatgaagaattactagaattagttgaaatggaagttcgtgacttattaactgaatacgacttcccaggcgacgacactccagttatcgcaggttcagctttgaaagccttagaaggcgacgcttcatacgaagaaaaaatcttagaattaatggctgctgttgatgaatacatcccaacaccagttcgtgatactgacaaaccattcatgatgccagyggaagacgtaytctcaatcactggtcgtggaactgttgcaactggtcgtgttgaacgtggacaagttcgcgttggtgacgaagttgaaatcgtaggtattgctgaagaaactgctaaaacaactgttacaggtgttgaaatgttccgtaaattgttggattacgctgaagcgggcgacaacattggtgcattattacgtggtgttgcacgtgaagacatccaacgtggacaagtattggctaaaccagcttcaatcactccacatacaaaattctctgcagaagtttacgttttaactaaagaagaaggcggacgtcatactccattcttcactaactaccgtcctcagttctacttccgtacaactgacgtaactggtgtagttgatctaccagaaggtactgaaatggtaatgcctggtgataacgtaactatggaagttgaattaatccacccaatcgcgatcgaagacggaactcgtttctctatt

SEQ ID NO: 71 - DNA, 835 bp, Enterococcus saccharolyticus
  ref <308>: DATABASE ACCESSION NUMBER: ATCC 43076
cggcgcgatcttagtagtatctgctgctgatggtcctatgcctcaaactcgtgaacacatcttgttatctcgtaacgtaggtgttccttacatcgttgtattcttaaacaaaatggatatggttgatgacgaagaattattagaattagtagaaatggaagttcgtgacttattatcagaatacgatttcccaggcgatgacactccagttattgcaggttctgctttgaaagctttagaaggcgatccagtttacgaagaaaaaatcttcgaattaatggctgcagttgacgaatatatcccaactccagaacgtgatactgaaaaaccattcatgatgccagttgaggatgtattctcaatcactggtcgtggtactgttgctacaggtcgtgttgaacgtggacaagttcgcgttggtgacgttgtagaaatcgttggtatcgacgaagaaacagctcaaactactgtaacaggtgttgaaatgttccgtaaattattagactacgctgaagcaggcgataacatcggtgctttattacgtggggttgctcgtgaagacatccaacgtggacaagtattagctaaaccaggaacaatcactcctcatacaaaattcgtagctgaagtttacgttttaactaaagaagaaggtggacgtcatactccattcttcactaactaccgtcctcaattctacttccgtacaactgacgtaactggtgttgtagaattacgcgaaggtactgaaatggtaatgcctggtgacaacgtaactatcgacgttgaattaatccacccaatcgctatcgaagacggaactcgtttctctatt

SEQ ID NO: 72 - DNA, 823 bp, Enterococcus solitarius
  ref <308>: DATABASE ACCESSION NUMBER: ATCC 49428
gagctatcttggtagtttctgcagctgatggcccaatgccacaaactcgtgaacatattttgttgtcacgtaatgtaggtgtaccttacatcgttgtgttcttgaacaaaatggatatggttgatgacgaagaattacttgagttagttgaaatggaagtacgtgatctattatctgaatacgacttcccaggagatgatactccagttatttccggttcagctttgaaagctttagaaggcgacgaagaatatgaacaaaaaattatggacttaatggatgcagttgatgactacattccaactcctgaacgtgaccatgacaaaccattcatgatgccaattgaagatgtattttcaattacaggccgtggtactgttgctacaggacgtgttgaacgcgggactatcaaagtcggcgatgaagttgacattattggtattcatgaagacgttaaaaagacaacagttactggtgtagaaatgttccgtaaattgttggactacgctgaagcaggcgataacattggtactttgttacgtggtgtttctcgtgatgatatcgaacgtggtcaagtattagctaaaccaggttcaatcacaccacatacaagattctctgctgaagtttatgttttgactaaagaagaaggcggacgtcatactccattcttctcaaactatcgtcctcaattctacttccgtacaactgatatcactggtgtcattgaattgccagaaggtactgaaatggtaatgccaggtgataatgtaacaatggatgttgaattaatccacccagtcgctatcgaagaaggaactcg

SEQ ID NO: 73 - DNA, 835 bp, Enterococcus casseliflavus
  ref <308>: DATABASE ACCESSION NUMBER: ATCC 25788
cggtgcaatcttggtcgtatcagcgacagatggcccaatgccacaaacacgggagcatattttgctttctcgtcaagtgggtgtgaaacatttgatcgtctttttgaataagacggaccttgtcgatgatgacgagttgatcgatttagttgaaatggaagtcagagaattgctgactgaatatgattttcctggcgacgacattcctgtgatcaagggctctgcgttaaaagccttggaaggggacccagatgctgaagcagcgatcttaacgctgatggatacagtagatgaatatatcccaacgccagaacgtgatactgacaaaccattgttgttaccgatcgaagatgtcttttcgatcacaggacgggggaccgttgcttctggtcggatcgatcgcggcatggtaaaagtcggggatgaagtagaaatcgtcggaatcaaacctgaaacacaaaaagcagtcgtgacaggggtagaaatgttccgcaaaacgatggacttcggagaagctggcgataacgtaggggtattgttacggggcatcacccgtgatgaaattgaacgtggccaagtgttagcaaaaccaggttctatcacaccgcatacgaaattccaagcggaagtctatgtgttgacaaaagaagaaggcggtcgccataccccattctttaataattatcgcccacaattttacttccgtacaacggacgtaactgggaatatcgttttaccagaaggaacggaaatggtgatgcctggtgacaacgtaacgatcgatgtggaattgatccatccgatcgctgtagaaaatggaacgaccttctcgatt

SEQ ID NO: 74 - DNA, 380 bp, Staphylococcus saprophyticus
  ref <308>: DATABASE ACCESSION NUMBER: ATCC 15305
taacgggcgtctcgatagaaaaacacgtgaaaatcccaatgattataaacaatcaatatacgattttgctgaagctgtaacaaaaggtattaaggaacaaacaaataaaaattaataggcaacttaaccagaatcgttaaaactatatgaagattctggttttttaaattcaaaaagttttctaaaaaatttacttgcttttttaagtataggtataaaatacgattgattaaaacagtaaaggaaatgaatcatgaaacaattaactaagcctttatacttttacctattactttttattacaacaacgctgattggcgcgttactattatatttgccaatcacaggtaaacatcctattgattttgtggacgcccgtt

SEQ ID NO: 75 - DNA, 666 bp, Enterococcus flavescens
  ref <308>: DATABASE ACCESSION NUMBER: ATCC 49996
gcaatcttggtcgtatcagcgacagatggcccaatgccacaaacacgggagcatattttgctttctcgtcaagtgggtgtgaaacatttgatcgtctttttgaataagacggaccttgtcgatgatgacgagttgatcgatttagttgaaatggaagtcagagaattgctgactgaatatgattttcctggcgacgacattcctgtgatcaagggctctgcgttaaaagccttggaaggggacccagatgctgaagcagcgatcttaacgctgatggatacggtagatgaatatatcccaacgccagaacgtgatactgacaaaccattgttgttaccgatcgaagatgtcttttcgatcacaggacgggggaccgttgcttctggtcggatcgatcgcggcatggtaaaagtcggggatgaagtagaaatcgtcggaatcaaacctgaaacacaaaaagcagtcgtgacaggggtagaaatgttccgcaaaacgatggacttcggagaagctggcgataacgtaggggtattgttacggggcatcacccgtgatgaaattgaacgtggccaagtgttagcaaaaccaggttctatcacaccgcatacgaaattccaagcggaagtctatgtgttgacaaaagaagaaggcggtcgccatacccca

SEQ ID NO: 76 - DNA, 751 bp, Enterococcus gallinarum
  ref <308>: DATABASE ACCESSION NUMBER: ATCC 49573
tggtgcgattttagttgtatccgcaacagatggtccaatgcctcaaacccgggaacatatcttgctttcgagacaagttggtgtgaaacatctgattgttttcttgaacaaaatcgatttagtcgatgacgaagaattgattgatttagtagaaatggaagtaagagaactgctatctgaatataattttccaggggatgacattcctgttatcaaaggttcggcattaaaagcgttggaaggagaccctgatgcagaagctgccatcatggaattaatggatacagtagacagctatatcccaacacctgagcgtgatacagacaaaccattactcttgccagttgaagatgtcttttcgattactggacgaggaacagttgcttccggacggatcgatcggggaacagttcgggtaggcgatgaagtagaaatcgtcggtatcaaacctgaaacccaaaaagctgtagtgacaggcgtcgaaatgttccgcaagacgatggactttggggaagccggtgacaatgtaggtgtcttgctgagagggatcactcgtgacgaaattgaacgaggacaagtgttggctaaaccaggttcgatcacaccacatacaaaattccaagcagaagtttatgtattgacgaaagaagaaggtggtcgtcatacaccattcttcaacaactatcgtccacaattttatttccgtacaacggatgtgacagggaacattacattgcctgaaggaacagaa

SEQ ID NO: 77 - DNA, 834 bp, Ehrlichia canis
  strain Florida
tgcagcaatattagtagtgtctgcaactgatggagcaatgccacaaacaagagaacatatattattagcaaagcaagtaggtgtaaaagatatagtagtgtggatgaataagtgtgatgttgtagatgatgaagaaatgttgtcattagttgaaatggaaataagggaattgttatcaaaatatgggtatcctggggatgatatagatgtagttagaggatctgcagttaaagcattagaagaagaaacaggctcaggtgtgtggagtgaaaaaataatggaattgatgaatgctttagaaaaaataagtttaccagtaagagaaaaagataagccatttttaatgtcaatagaagatgtgttttcaatacctggaagaggtacagtagtaacaggaagaatagaaagaggagtaattagagtaggggataaaatagagatagtaggattgcgtgagatacaaagtacagtatgtacaggtgttgaaatgtttcataaagcattagatgcaggagaagcaggggataatgctggaatattgttaagagggataaaaaaagaagatgtagaaagagggcaagtattgagtgcacctggacagatacattcatataagagatttaaggcagaggtatatatattgaaaaaagaagaaggaggaagacatactccatttttctcaaattaccagccgcaattttatgttagaacaacagatgtaacagggaatataaagttaccagaaggagtagaaatggtaatgccaggggataatataaatatcgaagtgagtttggataagcctgttgctattgatcaaggattgagatttgc

SEQ ID NO: 78 - DNA, 817 bp, Escherichia coli
  ref <308>: DATABASE ACCESSION NUMBER: ATCC 23511
cggcgcgatcctggtagttgctgcgactgacggcccgatgccgcagactcgtgagcacatcctgctgggtcgtcaggtaggcgttccgtacatcatcgtgttcctgaacaaatgcgacatggttgatgacgaagagctgctggaactggttgaaatggaagttcgtgaacttctgtctcagtacgacttcccgggcgacgacactccgatcgttcgtggttctgctctgaaagcgctggaaggcgacgcagagtgggaagcgaaaatcctggaactggctggcttcctggattcttayattccggaaccagagcgtgcgattgacaagccgttcctgctgccgatcgaagacgtattctccatctccggtcgtggtaccgttgttaccggtcgtgtagaacgcggtatcatcaaagttggtgaagaagttgaaatcgttggtatcaaagagactcagaagtctacctgtactggcgttgaaatgttccgcaaactgctggacgaaggccgtgctggtgagaacgtaggtgttctgctgcgtggtatcaaacgtgaagaaatcgaacgtggtcaggtactggctaagccgggcaccatcaagccgcacaccaagttcgaatctgaagtgtacattctgtccaaagatgaaggcggccgtcatactccgttcttcaaaggctaccgtccgcagttctacttccgtactactgacgtgactggtaccatcgaactgccggaaggcgtagagatggtaatgccgggcgacaacatcaaaatggttgttaccctgatccacccgatcgcgatggacgacggt

SEQ ID NO: 79 - DNA, 825 bp, Escherichia fergusonii
  ref <308>: DATABASE ACCESSION NUMBER: ATCC 35469
cgatcctggtagttgctgcgactgacggcccgatgccgcagactcgtgagcacatcctgctgggtcgtcaggtaggcgttccgtacatcatcgtgttcctgaacaagtgcgacatggttgatgacgaagagctgctggaactggttgaaatggaagttcgtgaacttctgtctcagtacgacttcccgggcgacgacactccgatcgttcgtggttctgctctgaaagcgctggaaggcgacgcagagtgggaagcgaaaatcctggaactggctggcttcctggattcttacattccggaaccagagcgtgcgattgacaagccgttcctgctgccgatcgaagacgtgttctccatctccggtcgtggtaccgttgttaccggtcgtgtagaacgcggtatcatcaaagttggtgaagaagttgaaatcgttggtatcaaagagactcagaagtctacctgtactggcgttgaaatgttccgcaaactgctggacgaaggccgtgctggtgagaacgtaggtgttctgctgcgtggtatcaaacgtgaagaaatcgaacgtggtcaggtactggctaagccgggcaccatcaagccgcacaccaagttcgaatctgaagtgtacattctgtccaaagatgaaggcggtcgtcatactccgttcttcaaaggctaccgtccgcagttctacttccgtactactgacgtgactggtaccatcgaactgccggaaggcgtagagatggtaatgccgggcgacaacatcaaaatggttgttaccctgatccacccgatcgcgatggacgacggtctgcgtttcgcaa

SEQ ID NO: 80 - DNA, 829 bp, Escherichia hermannii
  ref <308>: DATABASE ACCESSION NUMBER: ATCC 33650
ggcgcgatcctggttgttgctgcgactgacggcccgatgccgcagacccgtgagcacatcctgctgggtcgtcaggtaggcgttccgtacatcatcgtgttcctgaacaaatgcgacatggttgatgacgaagagctgctggaactggttgagatggaagttcgcgaactgctgtcccagtacgatttcccgggcgacgacaccccgatcgttcgtggttccgcgctgaaagcgctggaaggcgaagcagagtgggaagagaaaatcatcgaactggctggctacctggattcctatatcccggaaccagagcgtgcgattgacaagccgttcctgctgcctatcgaagacgtattctccatctccggccgtggtaccgttgttaccggtcgtgtagagcgcggtatcatcaaagtgggtgaagaagttgaaatcgtgggtatcaaagatactgcgaaatcaacctgtaccggcgttgaaatgttccgcaaactgctggacgaaggccgtgcgggcgagaacgtgggtgttctgctgcgtggtatcaaacgtgaagaaatcgaacgtggtcaggtactggctaagccgggttccatcaagcckcacaccaagttcgaatctgaagtgtacattctgtccaaagacgaaggcggccgtcacactccgttcttcaaaggctaccgtccgcagttctacttccgtacaactgacgtgactggcaccatcgaactgccggaaggcgttgagatggtaatgccgggcgacaacatcaaaatggttgttaccctgatccacccgatcgcgatggacgacggtctgcgtttcgcaa

SEQ ID NO: 81 - DNA, 816 bp, Escherichia vulneris
  ref <308>: DATABASE ACCESSION NUMBER: ATCC 33821
cggcgcgatcctggttgttgctgcgactgacggcccgatgccgcagacccgtgagcacatcctgctgggtcgtcaggtaggcgttccgtacatcatcgtgttcctgaacaaatgcgacatggttgatgacgaagagctgctggaactggttgagatggaagtgcgtgaacttctgtcccagtacgacttcccgggcgacgacaccccgatcattcgtggttctgcgctgaaagcgctggaaggcgaagctgagtgggaagagaaaatcgttgagctggctggctacctggattcctacatcccggaaccagagcgtgcgattgacaagccgttcctgctgccgatcgaagacgtattctccatctccggtcgtggtaccgttgttaccggtcgtgtagagcgcggtatcatcaargtkggtgaagaagttgaaatcgtgggtatcaaagatactgcgaaatctacctgtaccggcgttgaaatgttccgcaaactgctggacgaaggtcgtgcaggcgagaactgcggcgttctgctgcgtggtatcaagcgtgaagagatccagcgtggccaggttctggctaagccgggctcaatcaagccgcacaccaagttcgaatccgaagtgtacatcctgtccaaagacgaaggcggccgtcacactccgttcttcaaaggctaccgtccgcagttctacttccgtacaactgacgtgactggcaccatcgaactgccggaaggcgtagagatggtaatgccgggcgacaacatcaaaatggttgttaccctgatccatccgatcgcgatggacgacgg

SEQ ID NO: 82 - DNA, 828 bp, Eubacterium lentum
  ref <308>: DATABASE ACCESSION NUMBER: ATCC 43055
cggcgcctcctcgttatcgccgccaccgacggcccgatggcccagacccgcgagcacatcctgctcgcccgtcaggtcggcgtgccctacatcgtggtcttcctgaacaagtgcgacatggtcgacgacgaggagctcctcgagctcgtcgagatggaagttcgcgagctgctcgactcttacgagttcccgggcgacgacaccccgatcatccgcggctccgctttgaaggccctcgagggcgacaaagagtggcaggagaaggtctgggagctcatggacgccgtcgactcctacatcccgacgccggagcgcatggtcgacaagccgttcctgatggccgtcgaggacacgatgaccatcaccggccgcggcaccgttgccaccggtcgtgtggagcgtggtacgctgcatgtcaacgacccgctggagatcgtcggtatcaaggagacccagaacacggtctgcaccggtatcgagatgttccgcaagctgctcgacgaggctcaggccggcgacaacatcggctgcctgctccgcggtgtcaagcgcgaggagatcgttcgcggccaggttctctgcaagcccggtagcgtgaccccgcacaccgagttcgagggtcaggtctacatcctgacgaaggaagagggcggccgccacacgccgttcttcgacggctaccgtccgcagttctacttccgcacgacggacgtgacgggtgttgcccaccttcccgagggcaccgagatggtcatgccgggcgacaacgtggagatcaagggcgagctcattcacccgatcgccaggaagagggctgcgttcgctaac

SEQ ID NO: 83 - DNA, 835 bp, Eubacterium nodatum
  ref <308>: DATABASE ACCESSION NUMBER: ATCC 33099
ggagcaattctggtttgtgcagcaackgacggaccaatgcctcagacaagagaacatatccttttgtcaaggcaggtaggagtgccatatatcatcgtattcctgaataaatgtgacatggtggatgaygaagagcttctggacttggtagagatggaagtaagagaacttctcagtgagtatgaattcccgggagatgataccccgatagtaagaggttcagccctgaaggcactggaagaacccaatggagaatgggcagacaagattgtagagctgatggaggaagtagataaatacattcctgaaccaaagagagataacgacaaaccgttcctgatgcctgtagaggacgtattctcaataacaggaagaggaacagtagcgacaggaagrgttgaaagaggaatcctgaaggtcggtgatgaagtagaaatcgtgggaatgagcgaagagagaagaaaggtagtagtaacgggagttgaaatgttcagaaagcttctggatgaagcagagacaggagacaacatcggagcactgctgagaggagttcagagaacrgagatccagagaggtcaggtattggcrgcacctggaacgatcaacccacatacaaagttcaagggtcaggtatatgtactgaagaaggaagaaggaggaaggcatacgccgttcttcaayggatacagwccacagttctacttcagaacaacagacgtaacaggagatttgcagctgccggaaggarcagagatgtgcatgccgggagataatgtggtaatgaacrtcagcctgatcactccgattgctatagaagagggwctgagatttgcca

SEQ ID NO: 84 - DNA, 826 bp, Ewingella americana
  ref <308>: DATABASE ACCESSION NUMBER: ATCC 33852
gcgatcctggttgttgctgcaactgatggccctatgccacagactcgtgagcacatcctgttgggtcgycaggttggcgttccattcatgatcgtattcatgaacaaatgcgacatggttgatgacgaagagctgctggaactggtagaaatggaagttcgygaacttctgtctgcttacgatttcccaggcgacgacatcccagttgttaaaggttcagcgctgaaagcactggaaggcgaagcagagtgggaagctaagatcatcgagctggctggccacctggatagctacatcccagaaccagagcgtgcgattgacaagccattcctgctgccaatcgaagacgtattctccatctccggtcgtggtaccgttgttaccggtcgtgtagagcgcggtatcatcaaagttggcgaagaagttgaaatcgttggtatcaaggacactgttaagtctacttgtactggcgttgaaatgttccgcaaactgctggacgaaggccgtgcyggtgagaacgttggtgttctgctgcgtggtatcaagcgtgaagacatcgaacgtggtcaggttctggctaaaccaggttcaatcaaaccacacaccacwttygactcagaagtttatatcctgagcaaagatgaaggcggccgtcatactccgttcttcaaaggctaccgtccacagttctacttccgtacaactgacgtgaccggtaccatcgaactgccagaaggcgtagagatggtaatgccaggtgacaacatcaacatgrtagttaccctgatccacccaatcgcgatggatgacggtctgcgtttcgcaa

SEQ ID NO: 85 - DNA, 828 bp, Francisella tularensis
  strain LVS
tggtgctattctagtatgttctgctgcggatggtcctatgccacaaactcgtgagcacattctgctttctcgtcaagttggtgtaccaaaaatcgttgttttcttaaacaagtgtgacatggttgatgatgaagagttattagagctagttgagatggaagttcgtgagcttttagatcagtatgagttcccaggtgatgacactccagttattatgggttcagctcttagagctattgaaggtgacgaagcttacgttgagaaaattgttgagctagttcaagctatggatgactatattcctgctcctgagcgtgatactgagaagccatttattcttccgatcgaagatgtattctcaatttcaggtcgtggtactgttgtaactggtcgtattgagcgcggtgtagttaacgttggtgatgaagttgaagttgttggtattcgtccaactcaaaaaactacagtaactggtgtggaaatgttccgtaagcttttagatagaggggaagctggtgataacgttggtatcctagttcgtggacttaagagagatgatgttgagcgtggacaagtattatgtaagccaggttcaattaagccacatactaagtttgaagctgaggtttatgtattatctaaagaagagggtggtagacatactccattcttcaagggatatagaccacaattctacttccgtactacagacattactggagctgttgagcttccagagggtgtagaaatggttatgcctggtgataacgttaagatgactatcactctaattaacccaatcgctaggatgaagggttacgttttgca

SEQ ID NO: 86 - DNA, 829 bp, Fusobacterium nucleatum subsp. polymorphum
  misc_feature (1)...(829): n=a,t,c or g
  ref <308>: DATABASE ACCESSION NUMBER: ATCC 10953
cggtgctatcatcgtagktgctgctactgatggtccgatgcctcaractcgtgagcayatcytgctggctcgtcaggtaaacgtwcckagactggttgtattcatgaacaagtgygacatggtagacgacgctgaaatgytggaactcgttgaaatggaaatgcgtgaactgctttcagcytacgaattcgayggygacaacactcckttcattcagggttctgctcttggtgcrttgaayggcgttgaaaagtgggaagagaaggttatgganctgatggatgcttgcgacacttggattcctttgcctccgcgtgatattgayaaaccgttcttgatgccggttgaagacgtattctcaatcactggtcgtggtactgtagctactggtcgtatcgaagctggtgttatccatgtaggtgacgaagttgaaatcctcggtttgggtgaagacaagaagtctgttgtaactggtgttgaaatgttccgcaagttgctggatcaaggtgaagctggtgacaacgtaggtytgttgctccgtggtatcgacaagaacgaaatcaaacgtggtatggttctttgtaagcccggtcagattaaacctcactctaagttcaaagcttctatctacgttttgaagaaagaagaaggtggtcgtcacactccgttccacaacaaataccgtcctcagttctatctgcgtactatggactgtacaggtgaaatcwctcttccggaaggaactgaaatggtaatgcctggtgataacgtagaaatcactgtagaactgatctacccggtagcattgaacgtaggtttgcgtttcgct

SEQ ID NO: 87 - DNA, 828 bp, Gemella haemolysans
  ref <308>: DATABASE ACCESSION NUMBER: ATCC 10379
ctatcttagtaatcgctgctacagatggaccaatggctcaaactcgtgagcacatcctattatctcgtaacgttggagtaccaaaaatcgttgtattcttaaacaaatgtgatatggttgatgacgaagagttattagaattagttgaaatggaagttcgtgaactattatctgaatacggattcgacggagatgaactaccagtaatcaaaggttctgctcttaaagctcttgaaggagatgcagatgcagaaaaagctatcatcgaattaatggaaacagttgacgaatacatcccaactccagaacgtgataacgctaaaccattcatgatgccagttgaggacgtattctcaatcacaggtcgtggtacagttgctactggacgtgttgaacgtggacaagttaaagttggagacgtagtagaaatcgttggattaactgaagaaccagcttcaactactgtaacaggtgttgaaatgttccgtaaattattagattacgctgaagcaggagataacatcggtgcattattacgtggtgttgctcgtgaagacatcgaacgtggacaagttttagcagctcctaaaacaatcactccacacactcaattcgtagctgacgtgtacgtattatctaaagaagaaggtggacgtcacactccattcttcacaaactaccgtcctcaattctacttccgtactactgacgtaactggtgtagttactttaccagaaggtactgaaatggtaatgcctggggataacgtatcaatcaacgtagaacttatttctccaatcgcgatcgaagaaggaactcgtttctcaa

SEQ ID NO: 88 - DNA, 823 bp, Gemella morbillorum
  ref <308>: DATABASE ACCESSION NUMBER: ATCC 27824
tcttagtaatcgctgctacagatggtcctatggctcaaactcgtgaacacatcctattatctcgtaacgttggagtacctaaaattgttgtattcttaaacaaatgtgatatggttgatgacgaagagttattagaattagtagaaatggaagttcgtgaactattatctgaatacggatttgatggagatgaactaccagtaatcaaaggttcagctcttaaagctcttgaaggagatgcagatgctgaaaaagctatcatcgaattaatggaaacagttgacgagtacatcccaactccagaacgtgataacgctaaaccatttatgatgccagttgaggacgtgttctcaatcacaggtcgtggtacagttgctactggacgtgttgaacgtggacaagttaaagttggtgacgtagtagaaatcgttggattaactgaagaaccagcttcaactactgtaacaggtgttgaaatgttccgtaaattattagattacgctgaagcaggagataacatcggtgcattattacgtggtgttgctcgtgaagatatcgaacgtggacaagttttagcagctcctaaaacaatcactccacatactcaattcgtagctgatgtgtacgtattatctaaagaagaaggtggacgtcacactccattcttcacaaactaccgtccacaattctacttccgtactactgacgtaactggtgtagttactttaccagaaggtactgaaatggtaatgcctggggacaacgtatcaatcaacgtagaacttatttctccaatcgctatcgaagaaggaactcgtttctc

SEQ ID NO: 89 - DNA, 829 bp, Haemophilus actinomycetemcomitans
  ref <308>: DATABASE ACCESSION NUMBER: ATCC 33384
gctatcttagtagtagcagcaaccgacggtcctatgccacaaactcgtgagcacatcttattaggtcgccaagtaggtgttccttacatcatcgtattcttaaacaaatgcgacatggtagatgacgaagagttattagaattagttgaaatggaagttcgtgaacttctttctcaatatgacttcccgggcgatgacaccccaatcgtacgcggttctgcattaaaagcgcttgaaggcgatgccgcatgggaagaaaaaatccttgaattagcaaaccatttagatacttacatcccggaacctgagcgtgctatcgaccaaccgttccttcttccaattgaagatgtgttctctatctccggtcgtggtaccgtagtaacgggtcgtgttgagcgcggtatcatccgtaccggtgatgaagttgaaatcgtgggtatcaaaccgactgcaaaaaccaccgtaaccggtgttgaaatgttccgtaaattacttgacgaaggtcgtgcgggtgaaaacatcggtgcattattgcgtggtactaaacgtgaagaaatcgaacgtggtcaggtattggcgaaaccggggtcaatcaccccgcacactgacttcgaatctgaagtgtacgtattgtccaaagaagaaggtggtcgtcatactccattcttcaaaggttaccgtccacaattctatttccgtacaactgacgtaaccggtactatcgagttacctgaaggcgtggaaatggttatgcctggcgataacatcaaaatgaccgtatccttaattcacccaattgcgatggaccaaggtttacgtttcgctatcg

SEQ ID NO: 90 - DNA, 833 bp, Haemophilus aphrophilus
  ref <308>: DATABASE ACCESSION NUMBER: ATCC 33389
tggtgctatcttagtagtagcagcaactgatggtcctatgccacaaactcgtgagcacatcttattaggtcgccaagtaggtgttccttacatcatcgtattcttaaacaaatgcgacatggtagatgacgaagagttattagaattagttgaaatggaagttcgtgaacttctttctcaatatgacttcccgggtgatgatacaccaatcgtacgtggttctgcattacaagcgttaaacggcgttgcagaatgggaagaaaaaatccttgaattagcaaaccacttagatacttacattcctgagccacaacgtgctatcgaccaaccgttccttcttccaattgaagacgtgttctctatctccggtcgtggtactgtagtaacaggtcgtgttgagcgtggtatcatccgtaccggtgatgaagttgaaatcgtaggtatcaaaccgactgcgaaaactaccgtaaccggtgttgaaatgttccgtaaattacttgacgaaggtcgtgcaggtgaaaacatcggtgcattattacgtggcactaaacgtgaagaaatcgaacgtggtcaagtattggctaaaccgggctcaatcactccgcacactgatttcgaatctgaagtgtacgtattatccaaagaagaaggtggtcgtcatactccattcttcaaaggttaccgtccacaattctatttccgtacaactgacgtaaccggtactatcgagttaccggaaggcgtggaaatggttatgcctggcgataacatcaaaatgactgtatccttaatccacccaatcgcgatggaccaaggtttacgtttcgctatcg

SEQ ID NO: 91 - DNA, 815 bp, Haemophilus ducreyi
  DSM 8925
cggcgctatcttagttgtagcagcaactgatggtcctatgcctcaaactcgtgaacacatcttattaggccgccaagttggtgttccttacatcatcgtattcttaaataaatgcgatatggtagatgatgaagaattattagaattagttgaaatggaagttcgtgaacttctttctcaatatgatttcccaggtgacgatactcctatcgttcgtggttcagcattacaagcattaaatggtgtgcctgagtgggaagaaaaaatcattgaattagcacaacacttagattcttatatccctgagcctgagcgtgcgattgataaacctttcttattaccaatcgaagacgtattctcaatttcaggtcgtggtacagtagtaaccggtcgtgttgagcgtggtatcatcaaatcaggtgaagaagttgaaatcgtagggattaaagaaacgacaaaaacaacagtaaccggtgttgagatgttccgtaaactattagacgaaggtcgtgcgggtgaaaacgtaggtgccttattacgtggtactaaacgtgaagaaatcgaacgtggtcaagtattagcgaaaccaggtacaattacaccacacactgattttgaatcagaagtttatgtattatcaaaagaagaaggtggtcgtcatactccattcttcaaaggttatcgtcctcagttctacttccgyacaacggacgtaacaggaacgattgaattacctgaagatgttgagatggtaatgcctggtgataatatcaagatgacagtaagcttaattcaccctatcgcgatggacgaag

SEQ ID NO: 92 - DNA, 830 bp, Haemophilus haemolyticus
  ref <308>: DATABASE ACCESSION NUMBER: ATCC 33390
tggtgctatcttagtagtagcagcaactgatggtccaatgccacaaactcgtgagcacatcttattaggtcgccaagtaggtgttccatacatcatcgtattcttaaacaaatgcgacatggtagatgacgaagagttattagaattagtagaaatggaagttcgtgaacttctttctcaatatgacttcccaggtgacgatacaccaatcgtacgtggttctgcattacaagcattaaatggcgtagcagaatgggaagaaaaaatccttgagttagcaaaccacttagatacttacatcccagaaccagagcgtgcaattgaccaaccgttccttcttccaatcgaagatgtgttctcaatctcaggtcgtggtacagtagtaactggtcgtgtagaacgtggtatcatccgtactggtgatgaagtagaaatcgtaggtatcaaagatacagcaaaaactactgtaacgggtgttgaaatgttccgtaaattacttgacgaaggtcgtgcaggtgaaaacatcggtgcattattacgtggtaccaaacgtgaagaaatcgaacgtggtcaagtattagcgaaaccaggttcaatcacgccacacactgacttcgaatcagaagtttatgtattatcaaaagaagaaggtggtcgtcatactccattcttcaaaggttaccgtccacaattctatttccgtacaactgacgtaactggtactatcgagttaccagaaggcgtagaaatggtaatgccaggcgataacatcaagatgacagtaagcttaatccacccaatcgcgatggaccaaggtttacgtttcgcaa

SEQ ID NO: 93 - DNA, 824 bp, Haemophilus parahaemolyticus
  ref <308>: DATABASE ACCESSION NUMBER: ATCC 10014
tcttagtagtagcagcaacagacggtccaatgccacaaactcgtgagcacatcttattaggtcgccaagtaggtgttccatacatcatcgtattcttaaacaaatgcgatatggttgacgatgaagaattattagaattagttgaaatggaagtgcgtgaacttctttcacaatatgacttcccaggtgatgacacgccagtagtacgtggttcagcgttacaagcgttaaacggcgtagcagagtgggaagaaaaaattcttgaattagcaaaccacttagatacatacatcccagagccagagcgtgcgattgataaaccattcttattaccaatcgaagacgtattctcaatctcaggtcgtggtacagtagtaacaggtcgtgttgagcgtggtatcatcaaagcgggtgaagaagttgaaatcgtaggtatcaaagacactgcgaaaacaacagtaactggcgtggaaatgttccgtaaattattagacgaaggtcgtgcgggtgaaaacgttggtgcattattacgtggtacaaaacgtgaagaaatcgaacgtggtcaagtgttagcgaaaccaggtacaattacaccacacacagacttcgaatcagaagtgtacgtattatcaaaagaagaaggtggtcgtcacactccattcttcaaaggttaccgtccacaattctacttccgtacaactgacgtaactggtactattgaattaccagaaggcgtagaaatggtaatgccaggcgataacatcaaaatgacagtatcattaatccacccaatcgcgatggacgaaggtttacgttttgcgatt

SEQ ID NO: 94 - DNA, 833 bp, Haemophilus parainfluenzae
  ref <308>: DATABASE ACCESSION NUMBER: ATCC 7901
tggtgctatcttagtagtagcagcaactgatggtcctatgccacaaactcgtgagcacatcttattaggtcgccaagtaggtgttccttacatcatcgtgttcttaaacaaatgcgacatggtagatgacgaagagttattagaattagttgaaatggaagttcgtgaacttctttctcaatatgacttcccgggtgacgatacaccaatcgtacgtggttctgcattacaagcgttaaacggcgtwgcagaatgggaagaaaaaatccttgaattagctagccacttagattcttacattcctgagcctcaacgtgctatcgaccaaccgttccttcttccaatcgaagacgtgttctctatctccggtcgtggtacagtagtaacaggtcgtgttgagcgtggtatcatccgtaccggtgatgaagttgaaatcgtaggtatcaaaccgactgcgaaaactaccgtaaccggtgttgaaatgttccgtaaattacttgacgaaggtcgtgcaggtgaaaacatcggtgcattattacgtggtacyaaacgtgaagaaatcgaacgtggtcaagtattggctaaaccgggttcaatcactccacacactgatttcgaatctgaagtgtacgtattatccaaagaagaaggtggtcgtcatactccattcttcaaaggttaccgtccacaattctatttccgtacaactgacgtaaccggaactatcgaattaccggaaggcgtggaaatggttatgcctggtgataacatcaaaatgactgtatccttaatccacccaatcgcgatggaccaaggtttacgtttcgctatcg

SEQ ID NO: 95 - DNA, 824 bp, Haemophilus paraphrophilus
  ref <308>: DATABASE ACCESSION NUMBER: ATCC 29241
tggtgctatcttagtagtagcagcaactgatggtcctatgccacaaactcgtgagcacatcttattaggtcgccaagtaggtgttccttacatcatcgtattcttaaacaaatgcgacatggtagatgacgaagagttattagaattagttgaaatggaagttcgtgaacttctttctcaatatgacttcccgggtgacgatacgccaatcgtacgtggttctgcattacaagcgttaaacggcgttgcagaatgggaagaaaaaatccttgaattagcaaaccacttggatacttacattcctgagccacaacgtgctatcgaccaaccgttccttcttccaatcgaagacgtgttctctatctccggtcgtggtacagtagtaacaggtcgtgttgagcgtggtatcatccgtaccggtgatgaagttgaaatcgtaggtatcaaaccgactgcgaaaactaccgtaaccggtgttgaaatgttccgtaaattacttgacgaaggtcgtgcaggtgaaaacatcggtgcattattacgtggtaccaaacgtgaagaaatcgaacgtggtcaagtattggctaaaccgggttcaatcactccacacactgatttcgaatctgaagtgtacgtattatccaaagaagaaggtggtcgtcatactccattcttcaaaggttaccgtccacaattctatttccgtacaactgacgtaaccggtactatcgagttaccggaaggtgtggaaatggtaatgcctggcgataacatcaaaatgaccgtatccttaatccacccaatcgcgatggaccaaggtttacgtt

SEQ ID NO: 96 - DNA, 818 bp, Haemophilus segnis
  ref <308>: DATABASE ACCESSION NUMBER: ATCC 33393
gctatcttagtagtagcagcaactgatggtcctatgccacaaactcgtgagcacatcttattaggtcgccaagtaggtgttccttacatcatcgtattcttaaacaaatgcgacatggtagatgacgaagagttattagaattagttgaaatggaagttcgtgaacttctttctcaatatgacttcccaggtgatgatactccaatcattcgtggttctgcattacaagcgttaaacggcgtagcagaatgggaagaaaaaatccttgaattagctcaagcattagatacttacattcctgaacctgagcgtgcaatcgaccaaccgttccttcttccaattgaagacgtgttctcaatctctggtcgtggtactgtagtaacaggtcgtgtagagcgtggtatcatccgtaccggtgatgaagttgaaatcgttggtatcaaaccaactgcgaaaacaaccgtaaccggtgttgaaatgttccgtaaattacttgacgaaggtcgtgcaggtgaaaacatcggtgcattattacgtggtactaaacgtgaagaaatcgaacgtggtcaagtattagcgaaaccgggttcaatcactccacacactgacttcgaatctgaagtgtacgtattatctaaagaagaaggtggtcgtcatactccattcttcaaaggttaccgtccacaattctatttccgtacaactgacgtaaccggtactatcgagttaccggaaggcgtggaaatggttatgcctggcgataacatcaaaatgaccgtatccttaatccacccaatcgcgatggaccaaggtttacg

SEQ ID NO: 97 - DNA, 763 bp, Hafnia alvei
  ref <308>: DATABASE ACCESSION NUMBER: ATCC 13337
cggcgctatcctggttgttgctgcgactgacggccctatgcctcagactcgtgagcacatcctgctgggtcgtcaggttggcgttccttwcatcatcgtrttcctgaacaaatgcgacatggttgatgatgaagagctgctggaactggtagaaatggaagttcgtgaacttctgtctcagtacgacttcccwggygatgatactccaatcatccgtggttctgctctgaaagcgctggaaggygmacctgagtgggaagctaagatcgtagaactggctgaaactctggattcttacatyccacarccagaacgtgctatcgayaagccattcctgctgccaatcgaagacgtattctctatctctggccgtggtacwgttgttaccggtcgtgtagagcgcggtatcgttaaagttggtgaagaagttgaratcgttggtatcaaagataccgttaaatcaacttgtaccggcgttgaaatgttccgtaaactgctggacgaaggtcgtgcaggcgagaacgttggtgttctgctgcgtggtatcaagcgtgaagacatcgaacgtggtcaggttctggctaaaccaggytcyatcaagccacacaccaagttcgaatcagaagtttatattctgagcaaagatgaaggcggycgtcatactccgttcttcaaaggctaccgtccacagttctacttccgtacaactgacgtgaccggtaccatcgaattgccagaaggcgtggaaatggtaatgccaggc

SEQ ID NO: 98 - DNA, 828 bp, Kingella kingae
  ref <308>: DATABASE ACCESSION NUMBER: ATCC 23330
cggcgcaatcttggtatgttcagcagctgacggtcctatgccacaaactcgcgaacacatcttgttggctcgccaagtaggtgtaccttatatcatcgtattcatgaacaaatgcgacatggtcgatgatgctgagttgttggaattggttgaaatggaaatccgtgacttgttgtctagctacgattttccaggcgacgattgcccaatcgttcaaggttctgcattgcgygcattggaaggcgacgctgcatacaaagaaaaaatctttgaattggctgctgctttggatagctacattcctactccagaacgtgctgttgataaaccattcttgttgccaatcgaagatgtattctctatctctggtcgtggtacagtagttactggtcgtgtagagcgcggtatcatcaaagtaggcgaagagattgaaatcgttggtttgaaagacacgcaaaaaaccacttgtactggcgtggaaatgttccgcaaattgttggacgaaggtcaagctggtgataacgttggtgtattattgcgtggtacgaagcgtgaagacgttgaacgtggtcaggtattggctaaaccaggttctatcactccgcacactaaatttgaagctgaagtgtatgtgttgagcaaagaagaaggtggccgtcatacgccattcttcgctaactaccgcccacaattctacttccgtacgactgacgtaactggtgcagttactttgtctgagggtgtggaaatggttatgccaggcgaaaacgtgaaaatcactgttgagttgattgcacctatcgctaggaaaacggtttgcgttttgcg

SEQ ID NO: 99 - DNA, 828 bp, Klebsiella ornithinolytica
  ref <308>: DATABASE ACCESSION NUMBER: ATCC 31898
ggcgcgatcctggttgttgctgcgactgacggcccgatgccgcagactcgtgagcacatcctgctgggtcgtcaggtaggcgttccgtacatcatcgtgttcctgaacaaatgcgacatggttgatgacgaagagctgctggagctggttgaaatggaagtccgtgagctgctgtctcagtacgacttcccgggcgacgacacgccgatcgttcgtggttccgctctgaaagcgctggaaggcgaagcagactgggaagcgaaaatcatcgaactggctggctacctggattcttacatcccggaaccagagcgtgcgattgacaagccgttcctgctgccgatcgaagacgtattctccatctccggtcgtggtaccgttgttaccggtcgtgtagagcgcggtatcatcaaagtgggcgaagaagttgaaatcgttggtatcaaagagactgcgaagtctacctgtactggcgttgaaatgttccgcaaactgctggacgaaggccgtgctggtgagaacgttggtgttctgctgcgtggtatcaaacgtgaagaaatcgaacgtggtcaggtactggctaagccgggctctatcaagccgcacaccaagttcgaatctgaagtgtacattctgtccaaagacgaaggcggccgtcatactccgttcttcaaaggctaccgtccgcagttctacttccgtacaactgacgtgactggcaccatcgaactgccggaaggcgtagagatggtcatgccgggcgacaacatcaaaatggttgttaccctgattcacccgatcgcgatggacgatggtctgcgtttcgca

SEQ ID NO: 100 - DNA, 749 bp, Klebsiella oxytoca
  ref <308>: DATABASE ACCESSION NUMBER: ATCC 33496
gatgccgcagactcgtgagcacatcctgctgggtcgtcaggtaggcgttccgtacatcatcgtgttcctgaacaagtgcgacatggttgatgacgaagagctgctggaactggttgaaatggaagttcgtgaacttctgtctcagtacgatttcccgggcgacgacactccgatcgttcgtggttctgctctgaaagcgctggaaggcgacgcwgagtgggaakckaaaatcatcgaactggctggcttcctggattcttacattccggaaccagagcgtgcgattgacaagccgttcctgctgccgatcgaagacgtattctccatctccggtcgtggtaccgttgttaccggtcgtgtagagcgcggtatcatcaaagttggcgaagaagttgaaatygttggtatyaaagacactgctaagtctacctgtactggcgttgaaatgttccgcaaactgctggacgaaggccgygctggtgagaacgttggtgttctgctgcgtggtatcaaacgtgaagaaatcgaacgtggtcaggtactggctaagccgggctctatcaagccgcacaccaagttcgaatctgaagtttatatcctgtccaaagacgaaggcggccgtcacactccgttcttcaaaggctaccgtccgcagttctacttccgtacaactgacgtgactggcaccatcgaactgccggaaggcgtagagatggttatgccgggcgacaacatcaaaatggttgtta

SEQ ID NO: 101 - DNA, 830 bp, Klebsiella planticola
  ref <308>: DATABASE ACCESSION NUMBER: ATCC 33531
tggcgcgatcctggttgttgctgcgactgacggcccgatgccgcagactcgtgagcacatcctgctgggtcgtcaggtaggcgttccgtacatcatcgtgttcctgaacaaatgcgacatggttgatgacgaagagctgctggaactggttgaaatggaagttcgtgagctgctgtctcagtacgacttcccgggcgacgacactccgatcgttcgtggttccgctctgaaagcgctggaaggcgaagcagactgggaagcgaaaatcatcgaactggctggctacctggattcttacatcccggaaccagagcgtgcgattgacaagccgttcctgctgcctatcgaagacgtattctccatctccggtcgtggtaccgttgttaccggtcgtgtagagcgcggtatcatcaaagtgggcgaagaagttgaaatcgttggtatcaaagatactgctaartcwacctgtacyggcgttgaaatgttccgcaaactgctggacgaaggccgtgctggtgagaacgttggtgttctgctgcgtggtatcaaacgtgaagaaatcgaacgtggtcaggtactggctaagccgggctctatcaagccgcacaccaagttcgaatctgaagtgtacattctgtccaaagacgaaggcggccgtcatactccgttcttcaaaggctaccgtccgcagttctacttccgtacaactgacgtgactggcaccatcgaactgccggaaggcgtagagatggtaatgccgggcgacaacatcaaaatggttgttaccctgattcacccratcgcgatggacgacggtctgcgtttcgcaa

SEQ ID NO: 102 - DNA, 806 bp, Klebsiella pneumoniae subsp. ozaenae
  ref <308>: DATABASE ACCESSION NUMBER: ATCC 11296
cctggttgttgctgcgactgacggcccgatgccgcagactcgtgagcacatcctgctgggtcgtcaggtaggcgttccgtacatcatcgtgttcctgaacaaatgcgacatggttgatgacgaagagctgctggaactggttgagatggaagttcgtgaactgctgtctcagtacgatttcccgggcgacgacaccccgatcgttcgtggttctgctctgaaagcgctggaaggcgacgcagagtgggaagcgaaaatcatcgaactggctggccacctggatacctatatcccggaaccagagcgtgcgattgacaagccgttcctgctgccgatcgaagacgtattctccatctccggtcgtggtaccgttgttaccggtcgtgtagagcgcggtatcatcaaagtaggtgaagaagttgaaatcgttggtatcaaagaaaccgcgaaaaccacctgtactggcgttgaaatgttccgcaaactgctggacgaaggccgtgctggtgagaacgtaggtgttctgctgcgtggtatcaaacgtgaagaaatcgaacgtggtcaggtactggctaagccgggcaccatcaacccgcacaccaagttcgaatctgaagtgtacatcctgtccaaagacgaaggcggccgtcatactccgttcttcaaaggctaccgtccgcagttctacttccgtactactgacgtgactggcaccatcgaactgccggaaggcgtagagatggtaatgccgggcgacaacatcaaaatggttgttaccctgatccacccgatcgcgatggacgacg

SEQ ID NO: 103 - DNA, 743 bp, Klebsiella pneumoniae subsp. pneumoniae
  ref <308>: DATABASE ACCESSION NUMBER: ATCC 13883
gcagactcgtgagcacatcctgctgggtcgtcaggtaggcgttccgtacatcatcgtgttcctgaacaaatgcgacatggttgatgacgaagagctgctggaactggttgagatggaagttcgtgaactgctgtctcagtacgatttcccgggcgacgacactccgatcgttcgtggttctgctctgaaagcgctggaaggcgacgcagagtgggaagcgaaaatcatcgaactggctggccacctggatacctatatcccggaaccagagcgtgcgattgacaagccgttcctgctgccgatcgaagacgtattctccatctccggtcgtggtaccgttgttaccggtcgtgtagagcgcggtatcatcaaagtaggtgaagaagttgaaatcgttggtatcaaagaaaccgcgaaaaccacctgtactggcgttgaaatgttccgcaaactgctggacgaaggccgtgctggtgagaacgtaggtgttctgctgcgtggtatcaaacgtgaagaaatcgaacgtggtcaggtactggctaagccgggcaccatcaacccgcacaccaagttcgaatctgaagtgtacatcctgtccaaagacgaaggcggccgtcacactccgttcttcaaaggctaccgtccgcagttctacttccgtactactgacgtgactggcaccatcgaactgccggaaggcgtagagatggtaatgccgggcgacaacatcaaaatggttgtta

SEQ ID NO: 104 - DNA, 819 bp, Klebsiella pneumoniae subsp. rhinoscleromatis
  ref <308>: DATABASE ACCESSION NUMBER: ATCC 13884
tggttgttgctgcgactgacggcccgatgccgcagactcgtgagcacatcctgctgggtcgtcaggtaggcgttccgtacatcatcgtgttcctgaacaaatgcgacatggttgatgacgaagagctgctggaactggttgagatggaagttcgtgaactrctgtctcagtacgatttcccgggcgacgacaccccgatcgttcgtggttctgctctgaaagcgctggaaggcgacgcagagtgggaagcgaaaatcatcgaactggctggccacctggatacctatatcccggaaccagagcgtgcgattgacaagccgttcctgctgccgatcgaagacgtattctccatctccggtcgtggtaccgttgttaccggtcgtgtagagcgcggtatcatcaaagtaggtgaagaagttgaaatcgttggtatcaaagaaaccgcgaaaaccacctgtactggcgttgaaatgttccgcaaactgctggacgaaggccgtgctggtgagaacgtaggtgttctgctgcgtggtatcaaacgtgaagaaatcgaacgtggtcaggtactggctaagccgggcaccatcaacccgcacaccaagttcgaatctgaagtgtacatcctgtccaaagacgaaggcggccgtcacactccgttcttcaaaggctaccgtccgcagttctacttccgtactactgacgtgactggcaccatcgaactgccggaaggcgtagagatggtaatgccgggcgacaacatcaaaatggttgttaccctgatccatccgatcgcgatggacgacggtctgcgtttcgcaa

SEQ ID NO: 105 - DNA, 832 bp, Kluyvera ascorbata
  ref <308>: DATABASE ACCESSION NUMBER: ATCC 33433
cggcgcgatcctggttgttgctgcgactgatggccctatgccacagactcgtgagcacatcctgctgggtcgtcaggtaggcgttccttacatcatcgtgttcctgaacaaatgygacatggttgatgacgaagagctgctggaactggttgaaatggaagttcgtgaacttctgtctcagtacgatttcccaggcgacgatactccaatcatccgtggttctgctctgaaagcgctggaaggcgatgcagagtgggaagcgaaaatcatcgaactggctggcttcctggattcttacatcccagaaccagaacgtgctatcgataagccgttcctgctgccaatcgaagacgtattctccatctccggtcgtggtaccgttgttaccggtcgtgtagagcgcggtatcatcaaagttggygaagaagttgaaatcgttggtatcaaagacaccgctaagtctacctgtaccggcgttgaaatgttccgcaaactgctggacgaaggccgtgctggtgagaacgttggtgttctgctgcgtggtatcaaacgtgaagaaatcgaacgtggtcaggttctggctaagccaggctctatcaagccgcacaccaagttcgaatctgaagtgtacattctgtccaaagacgaaggcggccgtcatactccgttcttcaaaggctaccgtccacagttctacttccgtactactgacgtgaccggtaccatcgaactgccagaaggcgttgagatggtaatgccaggcgacaacatcaagatggttgtgactctgatccacccaatcgcgatggacgacggcctgcgtttcgcaacc

SEQ ID NO: 106 - DNA, 830 bp, Kluyvera cryocrescens
  ref <308>: DATABASE ACCESSION NUMBER: ATCC 33435
tggcgcgatcctggttgttgctgcaactgatggccctatgccacagactcgtgagcacatcctgctgggtcgtcaggtaggcgttccttacatcatcgtgttcctgaacaaatgtgacatggttgatgacgaagagctgctggaactggttgaaatggaagttcgtgaacttctgtctcagtacgatttcccaggcgacgacactcctatcgttcgtggttccgcgctgaaagcgctggaaggcgacgctgagtgggaagcaaaaatcatcgaactggctggcttcctggattcttacatcccagaaccagagcgtgcgattgataagccgttcctgctgccaatcgaagacgtattctccatctccggtcgtggtaccgttgttaccggtcgtgtagagcgcggtatcatcaaagttggtgaagaagttgaaatcgtgggtatcaaagacactgctaagtctacctgtaccggcgttgaaatgttccgcaaactgctggacgaaggccgtgctggtgagaacgttggtgttctgctgcgtggtatcaaacgtgaagaaatcgaacgtggtcaggttctggctaagccaggctccatcaagccgcacaccaaattcgaatctgaagtttacatcctgtccaaagacgaaggcggccgtcatactccgttcttcaaaggctaccgtccacagttctacttccgtactactgacgtgactggtaccatcgaactgccagaaggcgtagagatggtaatgccgggcgacaacatcaaaatggttgttaccctgatccacccaatcgcgatggacgacggtctgcgtttcgcaa

SEQ ID NO: 107 - DNA, 826 bp, Kluyvera georgiana
  ref <308>: DATABASE ACCESSION NUMBER: ATCC 51603
cgcgatcctggttgttgctgcgactgacggcccgatgccgcagactcgtgagcacatcctgctgggtcgtcaggttggcgttccgtacatcatcgtgttcctgaacaaatgcgacatggttgatgacgaagagctgctggaactggttgaaatggaagttcgtgaacttctgtctcagtacgacttcccgggcgacgacacgccgatcgttcgtggttctgctctgaaagcgctggaaggcgacgctgagtgggaagcgaaaatcatcgaactggcgggcttcctggattcttacatcccggaaccagagcgtgcgattgacaagccgttcctgctgccgatcgaagacgtattctccatctccggtcgtggtaccgttgttaccggtcgtgtagaacgcggtatcatcaaagttggcgaagaagttgaaatcgttggtatcaaagacaccgctaagtctacctgtactggcgttgaaatgttccgcaaactgctggacgaaggccgtgctggtgagaacgttggtgttctgctgcgtggtatcaaacgtgaagaaatcgaacgtggtcaggtactggctaagccgggttctatcaagccgcacaccaagttcgaatctgaagtgtacattctgtccaaagacgaaggcggccgtcatactccgttcttcaaaggctaccgtccgcagttctacttccgtactactgacgtgactggcaccatcgaactgccggaaggcgttgagatggtaatgccgggcgacaacatcaaaatggttgttaccctgatccacccgatcgcgaaggacgaaggtctgcgtttcgca

SEQ ID NO: 108 - DNA, 803 bp, Lactobacillus casei subsp. casei
  misc_feature (1)...(803): n=a,t,c or g
  ref <308>: DATABASE ACCESSION NUMBER: ATCC 393
gctgctgatggcccaatgccacaaactcgtgaacatatcttactttcacgtcaagttggtgttccatacatcgttgtattcatgaacaaatgtgacatggttgacgatgaagaattactagaattagttgaaatggaaattcgtgatctattaactgaatatgaattccctggcgatgacattcctgtaatcaaaggttcagctcttaaagcacttcaaggtgaagctgactgggaagctaaaattgacgagttaatggaagctgtagattcttacattccaactccagaacgtgatactgacaaaccattcatgatgccagttgaggatgtattctcaatcactggtcgtggaacagttgcaactggacgtgttgaacgtggacaagttaaagttggtgacgaagtagaagttatcggtattgaagaagagagcaaaaaagtagtagtaactggagtagaaatgttccgtaaatyactagattacgctgaagctggcgacaacattggcgcacttctacgtggtgttgctcgtgaagatatccaacgtggtcaagtattagctaaaccaggttcgattactccacacactaacttcaaagctgaaacttatgttttaactaaagaagaaggtggacgtcacactccattcttcaacaactaccgcccacaattctatttccgtactactgacgtaactggtattgttacacttccagaaggtactgaaatggtaatgcctggtgataacattgagcttgcagttganctaattgcaccaatcgctatcgaagacggtactaa

SEQ ID NO: 109 - DNA, 825 bp, Lactococcus lactis subsp. lactis
  ref <308>: DATABASE ACCESSION NUMBER: ATCC 19435
cggtgcaatcctcgttgttgctgcaactgatggaccaatgccacaaactcgtgaacacatcttgctttcacgtcaagttggtgttaaataccttatcgtcttccttaacaaggctgaccttgttgatgatgaagaattgatggaactcgttgaaatggaagttcgtgacctcttgagcgaatacgacttcccaggtgacgatattcctgtaatcgctggttcagcacttggtgctttgaacggtgaaccacaatgggttgctaaagttgaagaattgatggacatcgttgatgaatacatcccaactccagaacgcgacactgacaaaccactccttcttccagtcgaagacgtattctctatcactggtcgtggtacagttgcttcaggacgtatcgaacgtggtactgttaaagttggtgacgaagttgaaatcgttggtatcaaagaagaaactaaaaaagctgttgttactggtatcgaaatgttccgtaaaacacttactgaaggtcttgctggtgataacgtcggtgcacttctccgtggtatccaacgtgacgaaatcgaacgtggtcaagttattgctaaaccaggttcaatcactccacacaaacttttcgaaggtgaagtttacgtattgagcaaagaagaaggcggacgtcacactccattcttcgacaactaccgtcctcaattctacttccacacaactgacgttactggttcagttaaacttccagaaggaactgaaatggtaatgcctggtgacaacgtgcatatcgacgttgaattgatccacccagttgcgatcgaacaaggtactac

SEQ ID NO: 110 - DNA, 824 bp, Leclercia adecarboxylata
  ref <308>: DATABASE ACCESSION NUMBER: ATCC 23216
ggcgcgatcctggttgttgctgcgactgacggcccaatgcctcagacccgtgagcacatcctgctgggtcgtcaggtaggcgttcctttcatcatcgtgttcctgaacaaatgcgacatggttgatgacgaagagctgctggaactggttgagatggaagttcgtgaactyctgtcccagtacgacttcccgggcgacgacaccccaatcgttcgtggttctgcgctgaaagcgctggaaggcgaagcagagtgggaagagaaaatcatcgarctggctggctacctggattcctacatcccagagccagagcgtgcgattgacaagccgttcctgctgcctatcgaagacgtattctccatctccggtcgtggtaccgttgttaccggtcgtgtagagcgcggtatcatcaargttggcgaagaagttgaaatcgttggtatcaaggacactgctaagtctacctgtaccggcgttgaaatgttccgcaaactgctggacgaaggccgtgccggtgagaacgttggtgttctgctgcgtggtatcaaacgtgaagaaatcgaacgtggtcaggttctggctaagccaggctcyatcaagccgcacaccaagttcgaatctgaagtgtacatcctgtcyaaagacgaaggcggccgtcatactccgttcttcaaaggctaccgtccacagttctacttccgtackactgacgtgaccggtaccatcgarctgccagaaggcgttgagatggtaatgccaggcgacaacatcaaaatggttgttaccctgatccacccaatcgcaatggacgatggtctgcgttc

SEQ ID NO: 111 - DNA, 838 bp, Legionella micdadei
  ref <308>: DATABASE ACCESSION NUMBER: ATCC 33218
cggagcgatattagtagtatcagcagcggatggcccaatgcctcaaacgagagagcacatactyttatcccgscaggtaggtgttccctatatagtagtgttcttaaacaaagctgacatggtggatgatgcggagttattagaattagttgaaatggaagtacgcgayttgttgagcagctatgaatttccaggagatgagatcccgattgtagttggttcagcattaaaagcattggaaggcgatacgagtgatataggtgtaccagcgattgagaagttagttgagacgatggattcttatatacctgagccggtaagaaacatcgataaaagtttcttgttaccgatcgaagacgtgttctcaatatctggacgaggaacagtagtaacaggacgtatcgaaagcgggatcatcaaagttggtgaggaagtcgagattgttggtatacgtgacactcaaaagacgacatgcacaggcgttgaaatgttccgtaaattacttgacgaaggtcgagctggagacaacgttggtatattgctacgtggtacgaagcgggatgaagttgaacgcggacaagtattagctaagccgggaagcattaaaccgcatactaaatttgaagctgaagtgtatgtgttgtcaaaagatgaaggtggacgtcataccccattctttaacggatatcggcctcaattttacttcaggaccacagacgtaactggttcttgtgatttacctgarggtatagaaatggtaatgccaggtgataacgtcaagctgattgttagcttacactcaccgattgctatggacgaaggtttgcgttttgcaatc

SEQ ID NO: 112 - DNA, 838 bp, Legionella pneumophila subsp. pneumophila
  ref <308>: DATABASE ACCESSION NUMBER: ATCC 33152
cggagcgatactggttgtatcagcagctgatggtcctatgccacaaacgagggaacacattctattgtctcgccaggtaggtgttccatatattgttgtgttcatgaacaaagcggatatggttgatgaccctgagttattagagttagtggaaatggaagtgcgagatttattaagcagttacgatttcccaggggatgacatacctattgttgttggttcagctttgaaagcattggaaggtgaagacagtgatataggcgttaaggctattgagaaattggttgaaacaatggattcatacattcctgagccagttagaaacatagacaagccatttttgttgccgattgaagacgtattttcaatttctggacgcggaacagtggtaactggtcgtgtagagagtggaattgttaaagttggtgaggaagttgaaattgttggaataagagacacccaaaagacgacttgtacgggtgttgagatgttccgtaaattacttgatgaaggtcgagctggtgataacgttggtgtgttattacgaggtacgaagcgagatgaagtggagcgtggacaggtattggcgaagccaggaaccatcaagccacacaccaagtttgaagcagaagtgtatgtattatccaaggaagaaggcggacgtcacactccattctttaatggataccgtccacaattctatttcagaaccactgacgtgacaggtacttgtgacttgccatcaggagttgaaatggtaatgcctggagataatgtgcaattagttgttagcttgcatgctccgattgcgatggatgaaggtttaagattcgcaatt

SEQ ID NO: 113 - DNA, 828 bp, Leminorella grimontii
  ref <308>: DATABASE ACCESSION NUMBER: ATCC 33999
gtgcaatcctggtagtagcagcgactgacggcccgatgcctcagactcgcgagcacatcctgctgggtcgtcaggtaggcgttccgtacatcatcgtattcctgaacaagtgcgatatggttgatgacgaagagctgctggagctggttgaratggaagttcgcgaactgctgtctcagtacgacttcccgggcgacgacactccggtagtccgcggttcagcgctgaaagcgctggaaggcgaagccgagtgggaarcgaaaatcatcgagctggcaggccmtctggatacttatatcccagaacctgagcgtgcgattgacaagccgttcctgctgcckatcgaagacgtattctctatctccggccgtggtaccgttgttaccggtcgtgtagagcgcggcatcatcaaagtcggtgaagaagtggaaatcgtcggtatcaaagataccaccaagaccacctgtaccggcgttgaaatgttccgtaagctgctggacgaaggccgtgcgggcgagaacgtgggcgttctgctgcgcggtaccaagcgtgacgaaatcgaacgtggtcaagttctggccaagccgggcaccatcactcctcacacccagttcgtgtcagaagtgtatatcctgagcaaggatgaaggcggccgtcatactccgttcttcaaaggctaccgtcctcagttctacttccgtacgactgacgtgacaggcaccatcgaactgccggaaggcgtagagatggtaatgccaggcgacaacattcagatgaccgtaagtctgattgcgccgatcgcaatggacgaaggtctgcgcttcgcaa

SEQ ID NO: 114 - DNA, 826 bp, Leminorella richardii
  ref <308>: DATABASE ACCESSION NUMBER: ATCC 33998
gctatcctggttgttgctgcgactgacggcccaatgcctcagactcgtgagcacatcctgctgggtcgccaggtaggcgttccttacatcatcgtgttcctgaacaagtgcgacatggttgatgacgaagagctgctggaactggtagaaatggaagttcgtgaacttctgtctcaatacgacttcccgggcgacgatacgccggttgttcgcggttcagcgctgaaagcgctggaaggtgacgcygagtgggaarcgaaaatcattgaactggcggaatccttrgatacttayattccagagccagagcgtgcgattgacaagccgttcctgctgcctatcgaagacgttttctctatctctggccgtggtactgtagtcaccggtcgtgtagagcgcggcatcatcaaagttggtgaagaagtggaaatcgtgggaatcaaagacaccaccaagaccacctgtactggcgttgaaatgttccgtaagctgctggacgaaggccgtgcaggtgagaacgttggtgttctgctgcgyggtactaagcgtgacgaaatcgaacgtggtcaggtactggctaagccaggcaccatcactcctcacacagaattcgtgtcagaagtgtatatcctgagcaaggatgaaggcggycgtcatactccgttcttcaaaggctaccgtcctcagttctacttccgtacgactgacgtgaccggcaccatcgaactgccagaaggcgtagagatggtaatgccaggcgataacatccagatggtagttacgctgattgccccaatcgcgatggacgaaggtctgcgcttcgcaa

SEQ ID NO: 115 - DNA, 843 bp, Leptospira interrogans
  ref <308>: DATABASE ACCESSION NUMBER: ATCC 23581
tgcggcgattcttgtagtatccgcaactgacggacctatgccacaaacaaaagaacatatccttcttgctcgtcaggtaggtgttccatatgtaattgtattcattaacaaagcagatatgcttgctgctgacgaaagagcagaaatgatcgaaatggttgagatggacgttcgtgaacttctcaataagtatagcttcccaggagatacaactcctatcgttcatggttctgcggtaaaagcacttgagggcgatgaatctgaaattgggatgcctgcaattctcaaattgatggaagctctggatactttcgttccaaatccaaaacgtgtaatcgacaaacctttccttatgccagtagaagacgttttctcgatcactggtcgtggaactgttgcaactggaagagtggaacaaggtgttttgaaagtgaacgacgaagttgaaattatcggtatccgcccaacaacaaaaactgttgttaccggtatcgaaatgttcagaaaacttctcgatcaagcggaagctggcgacaacatcggcgctcttcttcgtggaactaaaaaagaagaaatcgaaagagggcaagttcttgcgaagccaggttctatcactcctcacaaaaagtttgccgctgaggtgtatgtattaactaaggatgaaggcggacgtcatactccgtttatcaataactaccgtcctcagttttactttagaacaactgacgtaaccggagtttgtaaccttcctaatggtgtcgaaatggttatgcctggtgataacgtttctttgacggttgaattgattagcccgatcgcaatggacaagggtcttaagttcgc

SEQ ID NO: 116 - DNA, 832 bp, Megamonas hypermegale
  ref <308>: DATABASE ACCESSION NUMBER: ATCC 25560
cggtgctatcctcgttgttagtgctgctgatggtcctatgcctcagactcgtgaacacatccttctcgctcgtcaggttggtgttccagctatcgttgtattcctcaacaaagctgaccaggttgatgaccctgaacttctcgaacttgttgaaatggaagttcgtgaacttctttccagctatgacttcccaggcgatgacgttccagtaatcactggttccgctcttcaggctctcgaaggcgacgaagaagctaaaaagaaaattcttgaattaatggatgctgttgatgattacatcccaactccaacacgtgacactgataaacctttcttaatgccagttgaagacgtattcacaattactggtcgtggtactgttgctacaggccgtgttgaacgtggcgaacttaaacttggtgacagcgttgaaatcgttggtctttccgatgaaaagaaatccactactgtaactggtatcgaaatgttccgcaaaatgcttgatagcgctgttgctggtgataacatcggtgcacttcttcgtggtattgaccgtaaagaaatcgaacgtggtcaagttcttgctaaacctggcacaattcatccacacaaaaaattcaaagctcaggtttacgtattaactaaagaagaaggtggacgtcatactccattcttctccaactatcgtccacagttctatttccgtactactgacgttactggtgttgtaactcttccagaaggtactgaaatggttatgcctggcgataacattgaaatgagcatcgaactcatcactccaatcgctattgaaaaaggtcttcgcttcgct

SEQ ID NO: 117 - DNA, 820 bp, Mitsuokella multacida
  ref <308>: DATABASE ACCESSION NUMBER: ATCC 27723
tggtgctatcctcgtcgtttccgctgctgatggcccgatgccgcagacgcgtgagcacatcctgctcgctcgccaggtcggtgttccggcaatcgttgtcttcctcaacaaggttgaccaggttgacgatccggagctcctcgagctcgtcgagatggaagttcgcgagctgctctccagctacgacttcccgggcgatgacatccctgtaatcgctggttccgctctgaaggccctcgaaggcgacgaagagcagaagaagaacatcctcaagctcatggaagctgtcgatgagtacatcccgacgccggtccgcgacaacgctaagccgttcctgatgccggtcgaggatgtcttcacgatcacgggccgtggtacggttgcaacgggccgcgttgagcgtggtgagctcaagatgaacgatacggttgagatcgttggtctgcaggacgagccgcgtcagacggttgtcacgggcatcgagatgttccgcaagatgcttgatttcgctgaggctggcgataacatcggtgctctgctccgtggtatcgaccgcaaggagatcgagcgtggccaggttctcgcaaagccgggcacgattcatccgcacacgaagttcaaggctcaggtctatgtcctgacgaaagaagaaggcggccgtcatacgccgttcttcacgaactatcgcccgcagttctacttccgcacgacggacgtaactggcgtagtcaaactgccggaaggcacggagatggttatgcctggcgataacgtcgagatggaagttgagctcatcaccccgatcgctatcgagaagggc

SEQ ID NO: 118 - DNA, 831 bp, Mobiluncus curtisii subsp. holmesii
  ref <308>: DATABASE ACCESSION NUMBER: ATCC 35242
cggcgctatcctcgtggtggctgctactgacggtccgatggctcagaccaaggaacacatcctgttggctaagcaggttggcgtgccctccatcctggtcgctctgaacaagtgcgattcttccgatgtggacgaagacatgctcgaaatcgtcgaggacgaaatccgcgatgacctggagaagcagggcttcgatcgtgactgcccgattatccacgtttccgctctgaaggccctggaaggcgaccccgagtggaccaagaagattgaagagctcatggaagcggtcgatacctacattcctgagcctgttcgtgacctcgacaagccgttcttgatgcctatcgaagacgtcttcaccattactggtcgcggtaccgtagtgaccggtcgtgtggaacgcggcaagctaccgttgaacgccgaagtggaaatcgtaggtattcgtcctacgcaaaagaccaccgttaccggtatcgaaatgttccacaagtccatggacgaagcctacgccggcgagaactgtggtctgttgctgcgtggcaccaagcgtgaggacgttgagcgcggtcaggttgtctgcattcctggctccgtgaccccgcacaccaagttcgagggcaaggtctacatcttgaagaaggacgaaggtggacgtcacaagtcgttctacgacggctaccgcccgcagttcttcttccgcaccaccgacgtgaccggtgttattcacctgcccgaaggcaccgaaatggttatgcctggcgacaccaccgaaattagcgttgagctgattcagcctatcgctatggaggaaggtctcggcttcgctat

SEQ ID NO: 119 - DNA, 825 bp, Moellerella wisconsensis
  ref <308>: DATABASE ACCESSION NUMBER: ATCC 35017
ggtgcaattctggttgttgctgcaactgatggccctatgccacagactcgtgagcacatcctgttaggtcgtcaggttggcgttccatacatcatcgttttcctgaacaaatgtgacatggtagacgacgaagagctgttagaactggttgaaatggaagtccgtgagctgctgtctcagtacgatttcccaggcgatgacactccagtaatccgtggttcagcgctgaaagctctggaaggcgaagctgagtgggaagctaaaatcattgaactggcagaagcactggattcttatatcccagagccagagcgtgacattgataagccattcctgttaccaatcgaagacgtattctcaatttcaggccgtggtacagttgttactggtcgtgttgagcgtggtatcgttaaagtcggtgaagaagttgaaatcgttggtatcaaagataccgtgaaaacaacatgtactggcgttgaaatgttccgtaaactgctggacgaaggccgtgctggtgagaacgttggtgttctgctgcgtggtactaaacgtgatgatatcgaacgtggtcaagtattggctaaaccaggttcaatcactccgcatacaactttcgaatcagaagtttacatcctgagcaaagatgaaggtggccgtcatactccattcttcaaaggttaccgtccacagttctacttccgtacaactgacgtaaccggtactatcgaactgccagaaggcgttgagatggtaatgccaggtgataacatcaaaatgatcgttactctgatccacccaattgcaatggatgcaggtctgcgtttt

SEQ ID NO: 120 - DNA, 827 bp, Branhamella catarrhalis
  ref <308>: DATABASE ACCESSION NUMBER: ATCC 43628
tggtgctatcttggttgtttctgcaactgatggtcctatgccacaaactcgtgagcatatcctactatctcgtcaggttggtgtaccatacatcatggtattcatgaacaagtgcgatatggttgatgatgaagagctactagaattggttgaaatggaagttcgtgaacttctatctgactatgatttccctggtgatgataccccaatcatcaaaggttcagcactagaagcattgaatggttctgatggtaaatatggcgagcctgcagttctagaactgctagacacactagacagctatatcccagagcctgagcgtgatatcgataagtcattcttgatgccaattgaagatgtcttctcgatctcaggtcgtggtacagttgtgactggtcgtgttgaatcaggtattattaaagttggtgatgaaattgaaatcatcggtatcaaaccaactgctaaaaccacctgtactggtgttgaaatgttccgtaaactgttagacgaaggtcgtgcaggtgagaactgtggtatcttgttgcgtggtactaagcgtgaagaagttcaacgcggtcaagtacttgcaaaaccaggttcaatcaccccacatactaagtttgatgctgaagtttatgtactgtcaaaagaagaaggtggtcgtcacaccccattcttaaatggctatcgcccacagttctacttccgtaccacagatgtgactggtgccatcactctacaagaaggtaccgaaatggttatgcctggtgacaatgttgagatgagtgttgagcttatccacccaatcgccaggataaaggtctacg

SEQ ID NO: 121 - DNA, 806 bp, Morganella morganii subsp. morganii
  ref <308>: DATABASE ACCESSION NUMBER: ATCC 25830
cggcgctatcctggttgttgctgcaactgatggccctatgccacagacccgtgagcacatcctgttaggtcgtcaggttggcgttccttacatcatcgtattcctgaacaaatgtgacatggttgatgatgaagagctgctggaactggttgaaatggaagttcgtgaacttctgtctcagtacgatttccctggcgacgacacgccaatcgttcgcggttcagcgctgaaagcactggaaggcgagccagagtgggaagctaaratcgttgaactggcaggtttcctggattcttacatccctgagccagagcgtgcaattgacaagccgttcctgctgccaatcgaagacgtattctcaatctccggccgtggtaccgttgttaccggtcgtgttgagcgcggtatcatcaaggttggtgaggaagttgaaatcgtgggtatcaaagatactgcgaaaaccacctgtaccggtgttgaaatgttccgcaaactgctggacgaaggccgtgcmggtgagaacgtcggtgttctgctgcgtggtaccaagcgtgaagaaatcgaacgtggtcaggttctggctaaaccaggttcaatcaaaccacayaccaaatttgaatcagaagtttatattctgagcaaagatgaaggtggtcgtcatactccattcttcaaaggytaccgtccacagttctacttccgtaccacagacgtaacaggtactatcgaactgccggaaggcgttgaaatggtaatgccgggcgacaacatcaaaatgatcgtcaccctgatccacccaatcgcaa

SEQ ID NO: 122 - DNA, 825 bp, Mycobacterium tuberculosis
  strain TB 299
ggtgcgatcctggtggtcgccgccaccgacggcccgatgccccagacccgcgagcacgttctgctggcgcgtcaagtgggtgtgccctacatcctggtagcgctgaacaaggccgacgcagtggacgacgaggagctgctcgaactcgtcgagatggaggtccgcgagctgctggctgcccaggaattcgacgaggacgccccggttgtgcgggtctcggcgctcaaggcgctcgagggtgacgcgaagtgggttgcctctgtcgaggaactgatgaacgcggtcgacgagtcgattccggacccggtccgcgagaccgacaagccgttcctgatgccggtcgaggacgtcttcaccattaccggccgcggaaccgtggtcaccggacgtgtggagcgcggcgtgatcaacgtgaacgaggaagttgagatcgtcggcattcgcccatcgaccaccaagaccaccgtcaccggtgtggagatgttccgcaagctgctcgaccagggccaggcgggcgacaacgttggtttgctgctgcggggcgtcaagcgcgaggacgtcgagcgtggccaggttgtcaccaagcccggcaccaccacgccgcacaccgagttcgaaggccaggtctacatcctgtccaaggacgagggcggccggcacacgccgttcttcaacaactaccgtccgcagttctacttccgcaccaccgacgtgaccggtgtggtgacactgccggagggcaccgagatggtgatgcccggtgacaacaccaacatctcggtgaagttgatccagcccgtcgccatggacgaaggtctgcgtttc

SEQ ID NO: 123 - DNA, 806 bp, Neisseria cinerea
  ref <308>: DATABASE ACCESSION NUMBER: ATCC 14685
cggtgcgatcttggtatgttccgcagctgacggtcctatgccgcaaactcgcgaacacatcctgttggcccgccaagtaggtgtaccttacatcatcgtgttcatgaacaaatgcgacatggttgacgatgccgagctgttggagctggttgaaatggaaatccgtgacttgctgtcaagctacgacttcccaggtgacgactgcccgatcgtacaaggttctgcactgaaagccttggaaggcgacgcagcttacgaagaaaaaatcttcgaattggctgctgcattggacagctacatcccaacacctgagcgtgcagtggacaaacctttcttgttgcctatcgaagacgtattctctatttccggtcgcggtacagtagtaaccggtcgtgtagagcgcggtatcatccacgttggtgacgagatcgaaatcgtaggtctgaaagaaactcaaaaaaccacttgtaccggtgttgaaatgttccgcaaactgctggacgaaggtcaagctggtgacaacgtaggtgtattgctgcgtggtactaaacgtgaagacgtagagcgtggtcaagtattggctaaaccgggtactatcactcctcacaccaagttcaaagcagaagtatacgtactgagcaaagaagagggtggtcgtcacactccgttcttcgctaactaccgtccacaattctacttccgtactaccgacgtaaccggcgcggttactttggaagaaggtgtagaaatggtaatgccgggtgagaacgtaaccattactgtagaactgattgcgcctatcgcta

SEQ ID NO: 124 - DNA, 822 bp, Neisseria elongata subsp. elongata
  ref <308>: DATABASE ACCESSION NUMBER: ATCC 25295
cggcgcaatcttggtatgttccgctgcygacggtcctatgccgcaaactcgcgaacacatcctgttggcccgccaagtaggcgtaccttacatcatcgtgttcatgaataaatgcgacatggttgaygatgccgaactgctggaactggttgaaatggaaatccgtgacttgctgtcaagctacgacttcccaggcgacgactgcccgatcgtacaaggttccgcactgaaagccttggaaggcgacgcagcttacgaagaaaaaatcttcgaactggctgctgcattggacagctacatcccgacacctgagcgtgccgtggacaaaccgttcctgttgcctatcgaagacgtattctctatctccggccgtggtacagtagtaaccggtcgtgtagagcgcggtatcatccacgtcggtgacgagatcgaaatcgtaggtctgaaagaaacccaaaaaaccacttgtaccggtgttgaaatgttccgcaaactgctggacgaaggtcaagcaggtgacaacgtaggcgtattgctgcgcggtaccaaacgtgaagaagtggaacgcggtcaagtattggctaaaccgggtaccatcactcctcacaccaaattcaaagcagaagtttacgtattgagcaaagaagagggtggtcgtcatactccgttcttcgctaactaccgtccacaattctacttccgtactaccgacgtaaccggtgcggttactttggaagaaggtgtagaaatggttatgcctggtgagaacgtggccatcactgtagaactgattgcacctatcgctatggaagaaggtctgcg

SEQ ID NO: 125 - DNA, 820 bp, Neisseria flavescens
  ref <308>: DATABASE ACCESSION NUMBER: ATCC 13120
cggcgcgacttggtatgttccgcagctgacggtcctatgccgcaaacccgcgaacacatcctgttggctcgccaagtaggtgtaccttacatcatcgtattcatgaacaaatgcgacatggtagacgatgccgagctgttggaactggttgaaatggaaattcgtgacttgttgtcaagctacgacttcccaggcgacgactgcccaatcgtacaaggttctgcactgaaagctttggaaggtgatgctgcttacgaagaaaaaatcttcgaattggctgctgccttggacagctacatcccaacacctgagcgtgctgtggacaaacctttcttgttgcctatcgaagacgtattctctatctctggtcgtggtacagtagtaaccggtcgcgtagagcgcggtatcatccacgttggtgacgagatcgaaatcgtaggtctgaaagaaactcaaaaaaccacttgtaccggcgttgaaatgttccgcaaactgctggacgaaggtcaagcaggtgacaacgtaggcgtattgctgcgtggtactaaacgtgaagacgtagagcgtggtcaagtattggctaaaccaggtaccatcactcctcacaccaaattcaaagcagaagtatacgtactgagcaaagaagagggtggtcgtcacactccatttttcgctaactaccgtccacaattctacttccgtactaccgacgtaactggtgcagttactttggaagaaggcgtagaaatggtaatgccaggtgagaacgtaaccattactgtagaactgattgcgccaatcgctatggaagaagtctgcg

SEQ ID NO: 126 - DNA, 830 bp, Neisseria gonorrhoeae
  ref <308>: DATABASE ACCESSION NUMBER: ATCC 49226
ggtgcaatcctggtatgttctgctgccgacggccctatgccgcaaacccgcgaacacatcctgctggcccgtcaagtaggcgtaccttacatcatcgtgttcatgaacaaatgcgacatggtcgacgatgccgagctgttggaactggttgaaatggaaatccgcgacctgctgtccagctacgacttccccggcgacgactgcccgatcgtacaaggttccgcactgaaagccttggaaggcgatgccgcttacgaagaaaaaatcttcgaactggctaccgcattggacagctacatcccgactcccgagcgtgccgtggacaaaccattcctgctgcctatcgaagacgtgttctccatttccggccgcggtaccgtagtcaccggccgtgtagagcgaggtatcatccacgttggtgacgagattgaaatcgtcggtctgaaagaaacccaaaaaaccacctgtaccggcgttgaaatgttccgcaaactgctggacgaaggtcaggcgggcgacaacgtaggcgtattgctgcgcggtaccaaacgtgaagacgtagaacgcggtcaggtattggccaaaccgggtactatcactcctcacaccaagttcaaagcagaagtgtacgtattgagcaaagaagagggcggccgccataccccgtttttcgccaactaccgtccccaattctacttccgtaccactgacgtaaccggcgcggttactttggaaaaaggtgtggaaatggtaatgccgggtgagaacgtaaccattactgtagaactgattgcgcctatcgctatggaagaaggtctgcgctttgcgat

SEQ ID NO: 127 - DNA, 816 bp, Neisseria lactamica
  ref <308>: DATABASE ACCESSION NUMBER: ATCC 23970
cggcgcaatcttggtatgttccgccgccgacggccctatgccgcaaacccgcgaacacattctgttggcccgccaagtaggtgtaccttacatcatcgtattcatgaacaaatgcgatatggtcgacgatgccgagctgttggaactggttgaaatggaaatccgcgacctgctgtcaagctacgacttcccaggcgacgactgcccaatcgtacaaggttccgcactgaaagctttggaaggcgatgccgcttacgaagaaaaaatcttcgaactggctgccgcattggacagctacatcccgactcccgagcgtgccgtggacaaaccgttcctgctgcctatcgaagacgtattctccatctccggccgcggtacggtagtaaccggccgtgtagagcgcggtgtcatccacgttggcgacgagatcgaaatcgtcggtctgaaagaaacccaaaaaaccacctgtaccggtgtcgagatgttccgcaaactgctggacgaaggtcaggcaggcgacaacgtaggcgtattgctgcgcggtaccaaacgtgaagaagtggaacgcggtcaggtattagccaaaccgggtaccatcactccgcacaccaagttcaaagcagaagtgtatgtattgagcaaagaagagggcggtcgtcacactccgttcttcgccaactaccgtccgcaattctacttccgtaccaccgacgtaaccggcgcggttactttggaagaaggcgtggaaatggtaatgcccggtgagaacgtaaccattactgtagaactgattgcgcctatcgctatggaagaagg

SEQ ID NO: 128 - DNA, 831 bp, Neisseria meningitidis
  ref <308>: DATABASE ACCESSION NUMBER: ATCC 13077
cggtgcaatcctggtatgttccgcagccgacggtcctatgccgcaaacccgcgaacacatcctgctggcccgtcaagtaggcgtaccttacatcatcgtgttcatgaacaaatgcgacatggtcgacgatgccgagctgttggaactggttgaaatggaaatccgcgacctgctgtccagctacgacttccccggcgacgactgcccgatcgtacaaggttccgcactgaaagccttggaaggcgatgccgcttacgaagaaaaaatcttcgaattggctgctgcattggacagctacatcccgactcccgagcgtgccgtggacaaacctttcttgttgcctatcgaagacgtattctctatttccggtcgtggtacagtagtaaccggtcgtgtagagcgcggtatcatccacgtcggtgacgagatcgaaatcgtcggtctgaaagaaactcaaaaaaccacttgtaccggtgttgaaatgttccgcaaactgctggacgaaggtcaagcaggcgacaacgtaggcgtattgctgcgcggtaccaaacgtgaagacgtagagcgtggtcaagtattggctaaaccgggtacaatcactcctcacaccaagttcaaagcagaagtatacgtactgagcaaagaagagggcggccgccataccccgttcttcgccaactaccgtccccaattctacttccgtaccaccgacgtaaccggcgcggttactttggaagaaggtgtggaaatggtaatgccgggcgagaacgtaaccatcaccgtagaactgattgcgcctatcgctatggaagaaggtttgcgctttgcgat

SEQ ID NO: 129 - DNA, 815 bp, Neisseria mucosa
  ref <308>: DATABASE ACCESSION NUMBER: ATCC 19696
cggcgcaatcttggtatgttctgctgcygacggtcctatgccgcaaacccgygaacacatcctgttggcccgtcaagtaggygtaccttacatcatcgtgttcatgaacaaatgcgacatggttgacgatgccgaaytgttggaactggttgaaatggaaatccgtgacttgctgtcaagctacgacttccctggygacgactgcccgattgtacaaggttctgcactgaaagccttggaaggcgatgccgcttacgaagaaaaaatcttcgaactggctgccgcattggacagctacatcccgactcccgagcgtgccgtagacaaaccgttcctgttgcctatcgaagacgtattctccatctccggtcgtggtacagtagtaaccggccgtgtagagcgcggtgttatccacgttggtgacgagatcgaaatcgtaggtctgaaagaaacccaaaaaaccacatgtaccggtgttgaaatgttccgcaaactgctggacgaaggtcaagccggtgacaacgtaggcgtattgctgcgcggtaccaaacgtgaagaagtggaacgcggtcaagtattggctaaaccgggtaccatcactccgcacaccaaattcaaagcagaagtgtacgtattgagcaaagaagagggtggtcgtcatactccgttcttcgctaactaccgtcctcaattctacttccgtactaccgacgtaaccggtgcggttactttggaagaaggtgtagaaatggttatgcctggtgagaaygtagccatyactgtagaactgattgcgcctatygctatggaagaag

SEQ ID NO: 130 - DNA, 829 bp, Neisseria sicca
  ref <308>: DATABASE ACCESSION NUMBER: ATCC 9913
ggcgcaatcttggtatgttccgctgctgacggtcctatgccgcaaacccgcgaacacatcctgttggcccgccaagtaggcgtaccttacatcatcgtgttcatgaacaaatgcgacatggttgacgatgccgagctgttggaactggttgaaatggaaatccgtgacttgctgtcaagctacgacttccctggtgacgactgcccgatcgtacaaggttctgcactgaaagccttggaaggcgacgccgcttacgaagaaaaaatcttcgaactggctgctgcattggacagctacatcccgactcctgagcgtgccgtggacaaaccgttcctgttgcctattgaagacgtattctccatctccggtcgcggtaccgtagtaaccggccgtgtagagcgcggtgttatccacgttggtgacgagattgaaatcgtaggtctgaaagaaacccaaaaaaccacttgtaccggtgttgaaatgttccgcaaactgctggacgaaggtcaagccggtgacaacgtaggcgtattgctgcgcggtaccaaacgtgaagaagtggaacgcggtcaagtattggctaaaccgggtaccatcactcctcacactaaattcaaagcagaagtttacgtattgagtaaagaagagggtggtcgtcatactccgttcttcgctaactaccgtcctcaattctacttccgtactaccgacgtaaccggcgcggttactttggaagaaggtgtagaaatggttatgcctggtgagaacgtagccatcactgtagaactgattgcaccgatcgctatggaagaaggtctgcgctttgcga

SEQ ID NO: 131 - DNA, 814 bp, Neisseria subflava
  ref <308>: DATABASE ACCESSION NUMBER: ATCC 14221
cggcgcgacttggtatgttccgcagctgatggtcctatgcctcaaactcgcgaacacatcctgttggctcgccaagtaggtgtaccttacatcatcgtattcatgaacaaatgcgacatggttgacgatgccgagctgttggaactggttgaaatggaaatccgtgacctgttgtcaagctacgacttcccaggcgacgactgcccaatcgtacaaggttctgcactgaaagctttggaaggtgacgctggttacgaagagaaaatcttcgaattggctgctgctctggacagctacatcccaacacctgagcgtgctgtggacaaacctttcttgttgcctatcgaagacgtattctctatctctggccgtggtacagtagtaactggtcgtgtagagcgcggtatcatccacgttggtgacgagatcgaaatcgtaggtctgaaagaaacccaaaaaaccacttgtaccggcgttgaaatgttccgcaaactgctggacgaaggtcaagctggtgacaacgtaggcgtattgctgcgtggtaccaaacgtgaagacgtagagcgtggtcaagtattggctaaaccaggtaccattactcctcacaccaaattcaaagcagaagtatacgtactgagcaaagaagagggtggtcgtcacactccattcttcgctaactaccgtccacaattctacttccgtactactgacgtaactggtgcagttactttggaagaaggcgtagaaatggtaatgccaggtgagaacgtaaccattactgtagaactgattgcgcctatcgctatggaagaag

SEQ ID NO: 132 - DNA, 818 bp, Neisseria weaveri
  ref <308>: DATABASE ACCESSION NUMBER: ATCC 51223
gccatcttggtatgttctgctgctgacggtcctatgccgcaaacccgtgagcacatcctgttggctcgtcaagtaggtgtaccctacatcatcgtattcatgaacaaatgcgatatggttgatgatgcagagctgctggaattggtagaaatggaaatccgtgatctgctgagcagctacgatttccctggcgatgattgyccaatcgtgcaaggttctgctttgaaagctttggaaggtgatgccgcttacgaagaaaaaatctttgaattagctgctgcattggatagctatattccaacwcctgagcgygctgttgataaaccattcctgttgccgattgaagatgtattctcaatttcaggtcgtggtacagtagtaactggtcgtgtagagcgcggtattattcacgtaggcgatgaaattgaaattgtaggtttgaaagaracycaaaaaactacttgtaccggcgttgaaatgttccgtaaattgctggatsaaggtcaggctggtgataacgtaggcgtattgttgcgtggtaccaaacgtgaagacgttgagcgtggtcaagtattggctaagcctggtwctattactccgcayaccaaattcaaagcagargtktatgtwttgagyaaggaagaaggcggtcgtcatactccgttcttcgctaactatcgtccgcaattctatttccgtactacagacgttaccggtgckgtractttagaagaaggtgtggaaatggtaatgcctggtgagaaygttgccattactgtwgarytgatygctccgattgckatggaagaaggytgcgt

SEQ ID NO: 133 - DNA, 836 bp, Ochrobactrum anthropi
  ref <308>: DATABASE ACCESSION NUMBER: ATCC 49188
cggcgcaattctggttgtttcggccgctgacggcccgatgccgcagacccgtgagcacatcctgctcgctcgtcaggttggcgttccggcaatcgtcgtgttcctgaacaagtgcgaccaggttgacgatgcagaactgctcgaactggttgaactggaagttcgcgaacttctgtcgaaatacgatttcccgggcgacgaagttccgatcatcaagggctcggctcttgctgctctggaagattcttcgaaggaactgggcgaagacgccgttcgttcgctgatggccgctgttgacgactacattccgaccccggaacgtccgatcgaccagccgttcctgatgccgatcgaagacgttttctcgatctcgggccgtggtacggttgtgacgggtcgcgttgagcgcggtatcgtcaaggttggtgaagaagttgaaatcgtcggcatcaaggcgacggcgaagacgacggtaaccggcgttgaaatgttccgcaagctgctcgaycagggccaggctggcgacaacatcggcgctctgatccgcggcgttggccgtgaagacgttgaacgcggccaggttctctgcaagccgggttctgtgaagccgcacaccaagttcaaggcagaagcctacattctgaccaaggacgaaggtggccgtcatacgccgttctttacgaactaccgtccgcagttctacttccgcacgacggacgtgaccggtgttgtcacgctgccggaaggcacggaaatggttatgcctggcgacaacgtcgctatggacgtcaccctgatcgtgccgatcgccatggaagagaagctccgcttcgcta

SEQ ID NO: 134 - DNA, 805 bp, Pantoea agglomerans
  ref <308>: DATABASE ACCESSION NUMBER: ATCC 27155
cctggttgttgctgcgactgatggcccaatgccacagacccgtgagcacatcctgctgggtcgtcaggttggcgttccttacatcatcgtgttcctgaacaagtgtgacatggttgatgatgaagagctgctggaactggtagagatggaagtacgtgacctgctgtcacagtacgacttcccaggcgatgacaccccgatcgttcgtggttctgctctgaaagcgctggaaggcgttcctgagtgggaagcaaaaatcgttgagctggctgaacacctggacaactacatcccggatccagtccgtgcgatcgacatgccgttcctgctgccaatcgaagacgtattctcaatctctggccgtggtaccgttgttaccggtcgtgttgagcgcggcatcgttaaagtcggcgacgaagttgaaatcgtgggtatcaaagatactgcgaaatcaacctgtaccggtgttgagatgttccgtaagctgctggaccagggtcaggcaggcgaaaactgtggtgttctgctgcgcggtatcaagcgtgaagacatccagcgtggccaggttctggctaagccaggctcaatcaagccgcacacccagttcgagtcagaagtttacgttctgtctaaagacgaaggtggccgccatactccgttcttcaaaggctatcgtccacagttctacttccgtacaactgatgtaaccggttcagtagagctgccagaaggcgttgagatggtcatgccaggcgacaacatcaaaatggttgttaccctgatccacccaatcgcaatggacgaa

SEQ ID NO: 135 - DNA, 825 bp, Pantoea dispersa
  ref <308>: DATABASE ACCESSION NUMBER: ATCC 14589
cgcgatcctggttgttgctgcgactgatggcccaatgcctcagacccgtgagcacatcctgctgggccgtcaggttggcgttccttacatcatcgtgttcctgaacaagtgtgacatggttgatgacgaagagctgctggaactggttgagatggaagttcgcgatctgctgtctcagtacgacttcccaggcgacgataccccaatcgtacgcggttctgcgctgaaagcgctggaaggcgacgctgagtgggaagcgaaagtcgttgagctggctggtcacctggatacttacattccagatccagtacgtgctatcgatctgccgttcctgctgccaatcgaagacgtattctcaatctctggccgtggtaccgttgttaccggtcgtgttgagcgcggcatcgtgaaagtgggcgacgaagtagaaatcgttggtatcaaagcgactgccaagtctacctgtaccggtgttgaaatgttccgcaaactgctggaccagggtcaggcaggcgagaactgtggtgttctgctgcgcggtatcaagcgtgaagagatccagcgtggtcaggttctggctaagccaggcaccatcaagccacacaccaagttcgtatcagaagtgtacgtactgtctaaagacgaaggcggccgtcatactccgttcttcaaaggctaccgtccacagttctacttccgtacyactgatgtgaccggcamcatmgaactgccagaaggcgttgagatggtaatgccaggcgacaacatcaaaatgrccgttgagctgatccacccaatcgcgatggaccagggtctgcgtttcgc

SEQ ID NO: 136 - DNA, 762 bp, Pasteurella multocida
  NCTC 10322
cacaaacacgtgagcacatccttttaggtcgccaagtaggcgttccttacatcatcgtattcttaaacaaatgcgacatggtggatgatgaagaattattagaattagttgaaatggaagtgcgtgaacttctttctcaatatgatttcccaggtgatgatacaccaatcgtacgtggttcagcgttacaagcgttaaacggygtagctgagtgggaagagaaaattcttgagttagccaaccacttagatacttacattccagagccacaacgtgcaatcgaccaaccgttccttcttccgattgaagacgtgttctcaatttctggtcgtggtacagtagtaacaggtcgtgttgagcgtggtatcatccgtacaggtgaagaggttgaaattgttggtattaaagcgacaacgaagaccacagtaacaggtgttgagatgttccgtaaattattagacgaaggtcgtgcgggtgagaacgttggtgctttattacgtggtactaarcgtgaagaaatcgaacgtggtcaagtgttagcgaaaccgggttcaatyacgccacacactgattttgaatcagaagtttacgtgttatcaaaagaagaaggtggtcgtcatacaccattcttcaaaggttaccgtccacagttctacttccgtacaacggacgtaacaggtacaatcgaattaccggaaggtgttgagatggtgatgcctggtgataacatcaagatgactgtaagtttgattcacccaatcg

SEQ ID NO: 137 - DNA, 832 bp, Peptostreptococcus anaerobius
  ref <308>: DATABASE ACCESSION NUMBER: ATCC 27337
tggagctatcttagttgtatcagcagcggatggaccaatgccacaaacaagagaacacatcttattatcaagacaagtaggagtaccatatatcgtagtatatttgaataaagcagatatggtagaagatgaagaattattagaattagtagaaatggaagtaagagaattactatctgaatatggattcccaggagatgaaattccaatcataacaggatcatccttaggagcattaaatggagaacaaaaatggatagatcaaatcatggcattgatgaaagccgtagatgaatatattccaacaccggaaagagcagtagatcaaccattcttgatgccaatcgaagacgtatttacaattacaggaagaggaactgtagtaacaggaagagttgaaagaggagttgtaaaagtwggagaagaagttgaaatcgtaggaatcaaagcgacaacaaagacaacttgtacyggagtagaaatgttccgaaaattattggatcaaggacaagcaggagataacatcggagctttattragaggaaccaagaaagaagatgtagaaagaggacaagtattggcaaaaccaggaacaattcatcctcatacaaacttcagtggagaagtatatgtattgacaaaagaagaaggaggaagacatactccattcttctcaggatacagaccacaattttactttagaaccacagatattacaggagcagtaacattaccagaaggagtagaaatggtaatgccrggagataatatcacaatgacagtagaattgattcacccaattgcaatggaaacaggattacgatttgcaatt

SEQ ID NO: 138 - DNA, 823 bp, Peptostreptococcus asaccharolyticus
  strain LSPQ 2639
tagtatgttcagcagcagayggtccaatgccacaaacaagagaacacattctactagcaagacaagttggtgtaccaaagatagtagtattcctaaacaaagaagaccaagtagacgatccagaactaattgaattagtagagatggaaatcagagacctactatcagaatatgacttcgayggagacaacacaccaatcgtagtaggatcagcattaaaagccctagacgatccagacggagaatggggagacaaaatcgtaaaactaatggaagmagtagacgaatacatcccaacaccagtaagagatacagaacacccattcctaatgccaatcgaagacrtattctcaatyacaggaagaggaacagtagcaacaggaagagtagaacaaggtgtagtaaaagtaggmgacacagtagaactagtaggcttaacagacgaaagcagacaagtagtagtaacaggtgtagaaatgtttagaaaacaactagacctagcagaagcmggagacaacattggagccctactaagaggagtacaaagagaagaaatccaaagaggacaagtactagcagcaccaggaacaatcaaaccacacacaaaatttgaagcagaagtatacgtactaacaaaagaagaaggtggaagacacacaccattctttaacggatacagaccacaattctacttcagaacaacagacgtaacaggagacatccaactagcagacggagtagaaatggtaatgccaggagacaactcaacatttacagtaacactaatcacaccaatcgcaatggacgaaggactaagattcgc

SEQ ID NO: 139 - DNA, 832 bp, Peptostreptococcus prevotii
  ref <308>: DATABASE ACCESSION NUMBER: ATCC 9321
ctatcatcgtagtatctgcagcagacggtccaatgcccaaacagagagaacacatcctactagcaagacaagtaggcgttccaaaaatcgcagtattcctaaacaaagaagaccaagtagacgatccagaactaatcgaattagtagaaatggaaatcagagacctactttcagaatacgacttcgatggagacaacgctccagtagtagtaggatctgctcttaaatcactagaagaaggcggagaaggcccatggtcagacaaaatccttgacctaatggcacaagtagacgaatacttcgacatcccagaaagagacaacgaccaaccattcctaatgccagtagaagacgtaatgacaatctcaggacgtggaacagtagcaacaggaagagttgaaagaggaacactaaaagttggtgatacagtagaaatcgtaggactaacagaagatacaaaagaaacagtagtaactggagtagaaatgttccacaaatcmctagaccaagcagaatctggagataacgtaggactactactaagaggagtaacaagagatcaaatctcaagaggacaagtactagcaaaaccaggwtcagtaaacccacacacagaattcgaaggtcaagtatacgtactaacaaaagaagaaggtggacgtcacacaccattcttcagtggatatagaccacaattcttctttagaacaacagacgtaacaggagacatcgaactagaagaaggcgtagaaatggtaatgccaggagacaacgcaacattcaaaatcacactccaaaaaccaatcgctctagaagaaggactaagattcgc

SEQ ID NO: 140 - DNA, 831 bp, Porphyromonas asaccharolytica
  ref <308>: DATABASE ACCESSION NUMBER: ATCC 25260
cggtgctatcatcgtagttgctgcaactgatggtcctatgcctcagacgcgtgagcacatcctactagcacgtcaggtcaacgtacctcgtctagttgtctttatgaacaagtgcgaccttgttgatgacgaggagatgctcgagctcgtagagatggatatgcgtgagctactaagcttctatgactttgacggcgacaacactcctgtcatccgtggttctgctcttggtgctctcaatggtgagcctaagtgggtagagaaggttatggagctcatggaggctgtagacacttggatcccactacctgagcgcgacatcgacaagcctttcctaatgcctgtagaggacgtattctctatcacaggtcgtggtactgtcgctactggtcgtatcgagactggtgtcgttaaggtcaacgatgaggttcagatcatcggtctaggtgctgagggtaagaagagcgtcgtaactggcgtggaaatgttccgcaagatccttgatgagggtgaagctggtgataacgtaggtctcctactccgtggtatcgacaaggacgagatcaagcgcggtatggtcctagcacacccaggtcaggtcaagcctcacgatcacttcaaggctgaggtctatatcctgaagaaggaagagggtggtcgtcacacaccattccacaacaagtaccgtcctcagttctacatccgtacgctagacgtaacgggcgagatcacactcccagagggtgtagagatggttatgcctggtgataacgtcaccatcgatgtcaagctcatctctccagtagcttgtagcgtaggtctacgcttcgc

SEQ ID NO: 141 - DNA, 818 bp, Porphyromonas gingivalis
  ref <308>: DATABASE ACCESSION NUMBER: ATCC 33277
cggtgctataatcgttgtagcagctacagacggtcctatgcctcagactcgcgagcacatccttttggctcgccaggtaaacgttcctcgtctggttgttttcatgaacaaatgtgacatggtagacgatgaagagatgctcgagcttgttgaaatggacatgcgcgaactcctttctttctacgatttcgatggtgacaatacccctatcatccgtggttctgctctgggcgctttgaatggagagcctcagtgggaagacaaggtgatggagcttatggaagctgttgacaactgggttcccctgcctgagcgcgatatcgacaaaccgttcttgatgccggttgaagacgtgttctctatcacgggtcgtggtacggtcgctacaggacgtatcgaaaccggtattgtgaagaccggtgacgaagttcaaatcatcggcctcggtgcagaaggaatgaagtcggttgttacgggtgttgaaatgttccgtaagattcttgacgaaggtcaggctggtgacaacgttggtctcctcctgcgtggtatcgataaggatcagatcaagcgtggtatggttatctctcacccgggtaagattactcctcacaagagatttaaggccgaggtttatatcttgaagaaagaagaaggtggtcgccacactcctttccacaacaaatatcgtccgcagttctacatccgtacgcttgacgtgaccggtgaaatcactcttcccgaaggaacagaaatggttatgcccggtgacaacgtaacgatcactgtagaactcatctacccggttgcatgtaatgtag

SEQ ID NO: 142 - DNA, 830 bp, Pragia fontium
  ref <308>: DATABASE ACCESSION NUMBER: ATCC 49100
cggcgctattctggttgttgctgcaactgatggtcctatgcctcaaactcgtgagcacatcctgttaggycgccaggttggcgtaccatacatcattgtgttcctgaacaagtgtgacatggttgaygatgaagagctgttagaactggttgaaatggaagttcgtgagcttctgtctcagtacgatttcccaggtgatgatactccagttgttcgtggttctgcgctgaaagcgttrgaaggcgaagctgagtgggaagctaaaatcattgaattggctgactccctggayagctacattccacagccagagcgtgcaattgataagccgttcctgctgccaatcgaagacgttttctcaatctctggccgtggtacagtagtaaccggtcgtgtagagcgcggtatcgttaaagttggtgaagaagttgaaatcgttggtatcaaagatactgtgaaaacaacttgtactggcgttgaaatgttccgtaarttactggatgaaggccgtgcgggtgagaacgttggtgttctgctgcgtggtactaagcgtgatgaaatcgaacgtggtcaagtattagcaaaaccaggttcaatcaacccgcatactaacttcgtatcagaagtttatatcctgagcaaagatgaaggtggtcgtcatactccattcttcaaaggctaccgtccacagttytacttccgtacaactgacgtgaccggtaccatcgaactgccagaaggcgtagagatggtaatgccaggtgataacattcagatgactgtaactctgattgccccaatcgcgatggacgaaggtttacgcttcgcta

SEQ ID NO: 143 - DNA, 821 bp, Prevotella melaninogenica
  ref <308>: DATABASE ACCESSION NUMBER: ATCC 25845
tggtgctatcttggttgtagctgctactgatggtcctatgcctcagactcgtgagcacgtattgctcgctcgtcaggtaaacgtacctcgcttggttgtattcttgaacaagtgtgatatggttgacgatgctgagatgcttgacctcgttgagatggaggttcgtgagatcctcgagcagtacggttatgaggaggatactcctattattcgtggttctgcactcggtgctttgaacggtgttgagaagtgggtagactctgtaatggagctcatggatactgttgacacttggattgaagagccagagcgtgagattgacaagccattcttgatgcctgttgaggacgtattctctatcacaggtcgtggtactgtagctactggtcgtatcgagactggtatctgtaaggtaggtgatgaggttcagttgctcggtctcggtgaggacaagaagtctgttatcactggtgttgagatgttccgtaagaaccttccaacaggtcaggctggtgacaacgtaggtctcctccttcgtggtatcgataaggctgaggttaagcgtggtatggttgttgtgcacccaggtgctattactcctcacgatcacttcaaggcatctatctatgtattgaagaaggaagagggtggtcgtcatactccattcggtaacaagtatcgtccacagttctacctccgtacaatggactgtacaggtgaaatccacctcccagagggcgttgagatggttatgccaggtgacaacgtagagattgaagttgtattgatctataaggttgctttgaacgagggtcttcgtt

SEQ ID NO: 144 - DNA, 827 bp, Prevotella oralis
  ref <308>: DATABASE ACCESSION NUMBER: ATCC 33269
tggtgctattcttgtagtagctgctactgacggtcctatgcctcaaactcgtgaacacgtgcttcttgctcgtcaggtgaacgtacctcgtttggtcgttttcttgaacaagtgcgatatggttgacgatgaagaaatgcttgagctcgtagaaatggagcttcatgaacttctcgagcagtatgaatatgaggaggatactcctattgttcgtggttcggcacttggcgctctgaatggagtagagaagtgggttgacagcgtgatgaagttgatggataccgttgatgaatggatacaggaaccaccgcgtgatcttgataagcctttcttgatgccggtagaggatgtattttctattactggtcgtggaacggttgttacaggccgtattgaaactggtaaggttaaggtgggcgatgaagttcaacttcttggtctcggtgaagataagaagtccgttgtgacaggcgttgagatgttccgtaagattcttgacgaaggtgaagctggtgataatgtaggcttgctgcttcgtggtatcgataagacggaagtaaagcgtggtatggttgtcgtacatccgggggctattactcctcacgatcatttcaaggcttcagtttacgtattgaagaaagaagaaggcggtcgccatactccgtttggtamcaagtatcgtccacagttctatcttcgtaccatggactgtactggtgaaattactcttccggaaggagttgagatggtaatgccgggtgataacgtcgaaattgaagttaagttgatctatccggtagctttgaacgagggacttcgtttcgcta

SEQ ID NO: 145 - DNA, 833 bp, Propionibacterium acnes
  ref <308>: DATABASE ACCESSION NUMBER: ATCC 6919
cggcgccatcctcgtggttgctgctaccgacggcccgatgcctcagactcgcgagcacgttctgctcgctcgtcaggtgggcgtgcccgccatcgtcgtcgccctcaacaagtgcgacatggttgacgatgaggagctcattgagctcgtcgagatggaggtccgcgagctgctgacctcgcaggagttcgacggcgacaactgccctgtcgttcgcatctccgccttccaggccctccagggtgatgagaagtggacccagtcgatcctcgacctcatggacgccgtggacgagtacatcccgcagcctgagcgcgatctcgacaagcccttccttatgccgatcgaggacgtcttcaccatcaccggccgtggcaccgttgtcaccggtcgtgtcgagcgcggcgtcgtcaagactggcgaagaggtcgagatcgtcggtatccacgagaagacccagaagaccaccgttaccggtgtcgagatgttccgcaagatcctcgacgagggccgcgctggtgagaacgtcggcgttctgctccgtggcaccaagaaggaggatgtcgttcgcggcatggtcctctccaagcctggttccaccaccccccacaccgacttcgagggccaggtctacgtcctcaagaaggatgagggtggccgccacaagccgttcttctcccactacagcccccagttctacttccgtaccacggacgtgactggcactgttgagctccccgagggcaccgagatggtcatgcctggcgacaacaccgacatgactgtgcacctgattcacccggttgccatggaggatcagctcaagttcgcta

SEQ ID NO: 146 - DNA, 745 bp, Proteus mirabilis
  ref <308>: DATABASE ACCESSION NUMBER: ATCC 35659
cacaaactcgtgagcacatcctgttaggtcgtcaggttggtgttccttacatcatcgtattcctgaacaaatgtgacatggtagatgatgaagagctgttagaattagttgaaatggaagttcgtgaacttctgtctcaatacgatttcccaggtgatgacactccagtaatccgtggttcagcgctgaaagcactggaaggcgaagcagagtgggaagcaaaaattgttgaattagcagaagcactggattcttatatcccagagccagagcgtgcaattgacaaaccattcctgttaccaatcgaagatgtattctcaatctcaggccgtggtacagtagttactggtcgtgtagagcgtggtatcatcaaagtaggtgatgaagttgagattgttggtatcaaagaaaccgccaaaacaacttgtactggcgttgaaatgttccgtaaattacttgacgaaggtcgtgcaggtgagaacgtaggtgttctgctgcgtggtacaaaacgtgaagaaatcgaacgtggacaagtactggcraaaccaggctcaatcaacccacacaacaaatttgaatcagaagtttatattctgagcaaagatgaaggtggtcgtcacactccattcttcaaaggctaccgtccacagttctacttccgtacaactgacgtaactggtactatcgaattaccagaaggcgtagaaatggtaatgccaggcgacaacgtgaacatgatcgttga

SEQ ID NO: 147 - DNA, 829 bp, Proteus penneri
  ref <308>: DATABASE ACCESSION NUMBER: ATCC 33519
ggagctatcctggttgttgctgcgacagatggcccaatgccacaaactcgtgagcacatcctgttaggtcgtcaggttggtgttccttacatcatcgtattcctgaacaaatgtgacatggtagatgatgaagagttactggaattagtmgaaatggaagttcgtgaacttctgtctcagtacgatttcccaggtgatgacactccagtaatccgtggttcagcgctgaaagcactggaaggcgaagcagagtgggaagcaaaaattgttgaattagcagaagcactggattcatacatcccagarccagagcgtgcaattgacaaaccattcctgttaccaattgaagacgtattctcaatttcaggccgtggtacagtagtaacaggtcgtgttgagcgtggcgtaatcaaagttggtgaagaagttgaaatcgttggtattaaaccaacagcgaaaacaacttgtactggcgttgaaatgttccgtaaattacttgacgaaggtcgtgcaggtgagaacgtaggtgttcttctgcgtggtactaaacgtgaagaaatcgaacgtggacaagtactggcgaaaccaggttcaatcaacccacacactaaatttgaatcagaagtttatattctgagcaaagatgaaggtggtcgtcatactccattcttcaaaggctaccgtccacagttctacttccgtacaactgacgtaactggtactatcgaattaccagaaggcgtagaaatggtaatgccaggtgacaacatcaacatgatcgttgaactgattcacccaatcgcgatggacgacggtttacgtttcgcta

SEQ ID NO: 148 - DNA, 824 bp, Proteus vulgaris
  ref <308>: DATABASE ACCESSION NUMBER: ATCC 13315
cggagctattctggttgttgctgcgactgatggcccaatgccacaaactcgtgagcacatcctgttaggtcgccaggttggtgtaccttacatcatcgtattcctgaacaaatgtgacatggttgatgatgaagaactgctggaattagtagaaatggaagttcgtgaacttctgtctcagtacgatttcccaggtgatgacactccagtaatccgtggttcagcgctgaaagcactggaaggcgaagctgagtgggaagcaaaaattgttgaattagcagaagcactggattcttacatcccagaaccagagcgtgcaattgacaaaccattcctgctgcctatcgaagacgtattctcaatctctggtcgtggtacagtagtaacaggccgtgtagagcgtggtgttgttaaagttggtgaagaagttgagattgttggtattaaagacacagttaaaacaacttgtactggcgttgaaatgttccgtaaattacttgacgaaggtcgtgcaggtgagaacgtaggtgttcttctgcgtggtactaaacgtgaagaaatcgaacgtggacaagtactggctaaaccaggttcaatcaagccacacactaaattcgaatcagaagtttatatcctgagcaaagatgaaggtggtcgtcacactccattcttcaaaggttaccgtccacagttctacttccgtacaactgacgtaactggtactatcgaattaccagaaggcgtagaaatggtaatgccaggtgacaacatcaacatgatcgttgaactgattcaccctatcgcgtaggacgacggtttacgtt

SEQ ID NO: 149 - DNA, 745 bp, Providencia alcalifaciens
  ref <308>: DATABASE ACCESSION NUMBER: ATCC 9886
cacaaactcgtgagcacatcctgttaggtcgccaagtaggtgttccttacatcatcgttttcctgaacaaatgtgacatggtagacgacgaagaactgttagaattagttgaaatggaagttcgtgaacttctgtctcagtacgatttcccaggcgatgacactccagttgttcgcggttcagcactgaaagcgctggaaggcaacccagagtgggaagcaaaaattgttgaattagcaggttacctggattcttacatcccagaaccagagcgtgcaattgacaagccattcctgctgccaatcgaagacgtattctcaatctctggtcgtggtacagtagtaacaggccgtgttgagcgtggtatcatcaaagttggtgaagaagttgaaatcgttggtattcaagcgactgcgaaaacaacttgtactggcgttgaaatgttccgtaaactgctggatgaaggtcgtgcgggtgagaacgttggtgttctgctgcgtggtactaaacgtgaagaaattcaacgtggtcaagtactggctaaaccaggttcaatcaagccacacactcaattcgaatcagaagtatatattctgagcaaagatgaaggtggtcgtcatactccattcttcaaaggctaccgtccacagttctacttccgtacaactgacgtaaccggtactatcgaactgccagaaggcgtagagatggtaatgccaggcgacaacatcaacatgatcgtgac

SEQ ID NO: 150 - DNA, 830 bp, Providencia rettgeri
  ref <308>: DATABASE ACCESSION NUMBER: ATCC 9250
cggtgcaatcctggttgttgctgcgactgatggcccaatgccacaaactcgtgagcacatcctgttaggycgccaagtaggtgtwccttacatcatcgttttcctgaacaaatgtgacatggtagacgacgaagaactgttagaattagttgaaatggaagttcgtgaacttctgtctcaatacgatttcccaggcgacgacactccagttgtccgtggttcagctctgaaagcgctggaaggcaacccagagtgggaagcgaaaattgttgaattagcaggtcacttggattcttacatcccagaaccagagcgtgcaattgacaaaccattcctgctgccaatcgaagacgtattctcaatctctggtcgtggtacagtagtaacaggccgtgttgagcgtggtatcatcaaagttggtgaagaagttgaaatcgttggtatccaagacacggttaaaacaacttgtactggcgttgaaatgttccgtaaactgctggacgaaggtcgtgcgggtgagaacgttggtgttctgctgcgtggtactaaacgtgaagaaattcaacgtggtcaagtactggcaaaaccaggttcaatcaagccacacactaaattcgaatcagaagtctatattctgagcaaagatgaaggtggtcgtcacactccattcttcaaaggttaccgtccacagttctacttccgtacaactgacgtaacaggtactatcgaactgccagaaggcgtagagatggtaatgccaggtgataacatcaacatgatcgttaccctgatccacccaatcgcgatggacgacggtttacgtttcgcaa

SEQ ID NO: 151 - DNA, 826 bp, Providencia rustigianii
  ref <308>: DATABASE ACCESSION NUMBER: ATCC 33673
cggtgcaatcctggttgttgctgcgactgatggcccaatgccacaaactcgtgagcacatcctgttaggtcgccaagtaggtgttccttacatcatcgttttcctgaacaaatgtgacatggttgacgacgaagaactgttagaattagttgaaatggaagttcgtgaacttctgtctcagtacgatttcccaggcgacgacactccagttgttcgyggttcagcactgaaagcgctggaaggtatccctgagtgggaagcgaaaattgttgaattagccggttacctggacagctacatcccagaaccagagcgcgcaattgaccgtccattcctgctgccaatcgaagacgtattctcaatctctggtcgtggtacagtagtaacaggscgtgttgagcgtggtatcgttaaagttggtgaagaagttgaaatcgttggtatccaagacacrgttaaaacaacttgtactggcgttgaaatgttccgtaaactgcttgacgaaggtcgtgctggtgagaacgttggtgttttactgcgtggtactaagcgtgaagaaattcaacgtggtcaagtactggctaaaccaggttcaatcaagccacacactacttttgaatcagaagtttatattctgagcaaagatgaaggtggtcgtcatactccattcttcaaaggctaccgtccacagttctacttccgtacaactgacgtaaccggtactatcgaactgccagaaggcgtagagatggtaatgccaggcgacaacatcaacatgatcgtgacactgattcacccaatcgcgatggatgatggtttacgtttc

SEQ ID NO: 152 - DNA, 830 bp, Providencia stuartii
  ref <308>: DATABASE ACCESSION NUMBER: ATCC 33672
cggtgcaatcctagttgttgcggcaacagatggcccaatgccacaaactcgtgagcacatcctgttaggtcgtcaggttggcgttccttacatcatcgtgttcctgaacaaatgtgacatggtagacgacgaagagctgctggaactggttgaaatggaagttcgtgaacttctgtctcaatacgatttcccaggtgatgacactccagttatccgtggttcagcgctgaaagcgttggaaggcaacccagagtgggaagcgaaaatcgttgaactagcagaagcactggacagctacatcccagagccagagcgtgcaattgacaagccattcctgctgccaatcgaagacgtattctcaatctcaggtcgtggtacagtagtcacaggccgtgttgagcgtggtatcatcaaagttggtgaagaagttgaaatcgtaggtatcaaagagactgcgaaaaccacttgtactggcgttgaaatgttccgtaaactgctggacgaaggccgtgcgggtgagaacgtaggtgttctgctgcgtggtactaagcgtgaagaaatcgaacgtggtcaagttctggcgaaaccaggttcaatcaagccacacacaactttcgaatcagaagtttatattctgagcaaagatgaaggtggtcgtcacacgccattcttcaaaggytaccgtccacagttctacttccgtacaactgacgtaacaggtactatcgaactgccagaaggcgtagagatggtaatgccaggcgacaacgtgaacatgaaagtaactctgattcacccaatcgcgatggacgatggtttgcgtttcgcaa

SEQ ID NO: 153 - DNA, 827 bp, Pseudomonas aeruginosa
  ref <308>: DATABASE ACCESSION NUMBER: ATCC 35554
cctggtttgctcggctgccgacggccccatgccgcagacccgcgagcacatcctgctgtcccgccaggtaggcgttccctacatcgtcgtgttcctgaacaaagccgacatggtcgacgacgccgagctgctggaactggtcgagatggaagttcgcgatctgctgaacacctacgacttcccgggcgacgacactccgatcatcatcggttccgcgctgatggcgctggaaggcaaggatgacaacggcatcggcgtaagcgccgtgcagaagctggtagagaccctggactcctacattccggagccggttcgtgccatcgaccagccgttcctcatgccgatcgaagacgtgttctcgatctccggtcgcggtaccgtggtaaccggtcgtgtagagcgcggcatcatcaaggtccaggaagaagtggaaatcgtcggcatcaaggcgaccaccaagaccacctgcaccggcgttgaaatgttccgcaagctgctcgacgaaggtcgtgctggtgagaacgttggtatcctgctgcgtggcaccaagcgtgaagacgtagagcgtggccaggtactggccaagccgggcaccatcaagccgcacaccaagttcgagtgcgaagtgtacgtgctgtccaaggaagaaggtggtcgtcacaccccgttcttcaagggctaccgtccgcagttctacttccgtaccackgacgtgaccggtamctgcgagctgccggaaggcgtagagatggtaatgccgggcgacaacatcaagatggttgtcaccctgatcgctccgatcgccatggaagatggctgcgttcgcg

SEQ ID NO: 154 - DNA, 841 bp, Pseudomonas fluorescens
  ref <308>: DATABASE ACCESSION NUMBER: ATCC 13525
cggcgcaatcctggtttgctcggccgctgatggtccgatgccacaaacccgtgaacacatcctgctgtcccgtcaggttggcgttccgtacatcgtggtttacctgaacaaggctgacctggtagacgacgctgagctgctggaactggttgagatggaagtgcgcgatctgctgagcacttacgacttcccaggcgacgacactccgatcatcatcggttctgctcgtatggctctggaaggcaaagacgacaacgaaatgggcaccacgtccgttcgtaaactggttgaaactctggacagctacatcccagatccagttcgtgttatcgacaagccgttcctgatgccaatcgaagacgtgttctcgatctccggtcgcggtactgttgtgactggtcgtatcgagcgcggtatcgttaaggttcaagatccactggaaatcgttggtctgcgtgacactaccgtcaccacctgcaccggtgttgaaatgttccgtaagctgctcgacgaaggtcgtgctggcgagaactgcggcgttctgctgcgtggtaccaagcgtgacgacgttgagcgtggccaggttctggttaagccaggttcggttaagccgcacaccaagttcgaagctgaagtctacgtactgagcaaagaagaaggcggtcgtcacactccgttcttcaaaggctaccgtccacagttctacttccgtactactgacgtgactggtaactgcgagctgccggaaggcgttgaaatggttatgccaggcgacaacatcaaaatggttgttaccctgatcaaaaccatcgcaatggaagacggtctgcgtttcgctatt

SEQ ID NO: 155 - DNA, 841 bp, Pseudomonas stutzeri
  ref <308>: DATABASE ACCESSION NUMBER: ATCC 17588
cggcgcgatcctggtctgctcggctgctgacggccccatgccgcagactcgcgagcacatcctgctgtcccgtcaggttggtgttccgtacatcgtcgtgttcctgaacaaggccgacatggttgatgacgccgagctgctcgagctggtcgagatggaagttcgygacctgctgtcgacctacgacttcccgggtgaygacactccgatcatcatcggctccgcgctgatggcgctgaacggcgaagacgacaacgagctcggcaccactgcggtgaagaagctggtcgagaccctggacagctacattcccgagccggttcgtgccatcgacaagccgttcctgatgccgatcgaagacgtgttctcgatctccggtcgcggcacsgtggtaaccggtcgcgtagagcgcggcatcgtcaaggttcaggaagagatcgagatcgtcggtctgcgtccgaccaccaagactacctgcaccggcgttgagatgttccgcaagctgctcgaygarggtcgtgctggcgagaactgcggygtgctgctgcgtggcaccaagcgtgacgaagtggagcgtggtcaggttctggccaagccgggcaccatcaagccgcacaccaagttcgaagccgaagtgtacgtgctgtccaaggaagaaggtggtcgtcacaccccgttcttyaagggctaccgtcckcagttctacttccgtaccactgaygtgacyggwtcgtgcgarctgccggaaggcgtcgagatggtaatgccgggcgacaacgtgaagatggttgtcaccctgatcaagccgatcgccatggaagacggcctgcgcttcgcgatt

SEQ ID NO: 156 - DNA, 833 bp, Psychrobacter phenylpyruvicus
  ref <308>: DATABASE ACCESSION NUMBER: ATCC 23333
gctattctagtagtatcagcaactgacggtccaatgccacaaacacgtgagcacattctattatcacgtcaggttggtgtaccatacatcatcgtattcatgaacaaatgtgacatggtagatgacgaagagttactagagctagtagaaatggaagtgcgtgaattactttcagactacgacttcccaggtgatgacactccaatcatcaaaggttcagctttagaagcgttaaatggtaacgacggtaagtacggtgagccagcagttatcgaactactaaacactctagacacttacattccagagccagagcgtgacatcgataagccattcctaatgccaatcgaagacgtattctcaatctcaggtcgtggtacagtagtaacaggccgtgttgaatctggtatcatcaaagttggtgacgaaatcgaaatcgttggtatcaaagacacagttaaaacaacttgtactggtatcgagatgttccgtaagttactagacgaaggtcgtgctggtgagaactgtggtgtactattacgtggtactaagcgtgaagacgtacaacgtggtcaagtacttgctaagccaggttcaatcactccacacaccaacttcgacgcagaagtatacgtactatcaaaagaagaaggtggtcgtcacactccattcttaaatggttaccgtccacagttctacttccgtactactgacgtaacaggtgcaatcacgttacaagaaggtactgaaatggtaatgccaggcgataacgttgagatgagcgtagagctaatccacccaatcgctaggacaaaggtttacgtttcgcaatc

SEQ ID NO: 157 - DNA, 825 bp, Rahnella aquatilis
  ref <308>: DATABASE ACCESSION NUMBER: ATCC 33071
ggcgctatcctggttgttgctgcaactgacggccctatgcctcagactcgtgagcacatcctgctgggtcgccaggttggcgttccatacatgatcgtgttcatgaacaaatgcgacatggtagatgacgaagagctgctggaactggtagaaatggaagttcgcgaacttctgtctgcttacgaattcccaggcgacgacatcccggtcatcaaaggttcagcgctgaaagcactggaaggcgatgctacttgggaagcgaaaatcatcgaactggcagaagcactggacagctacattccattgccagagcgtgctatcgataagccattcctgctgccaatcgaagacgtattctccatctccggtcgtggtacagtggttaccggtcgtgtagagcgcggtatcgttaaagtgggcgaagaagttgaaatcgtcggtatcaaggacactgttaagtctacttgtactggcgttgaaatgttccgcaaactgctggacgaaggccgtgcgggcgagaacgtgggtgttctgctgcgtggtatcaagcgtgaagacatcgaacgtggtcaggttctggctaaaccaggttcaatcaaaccacacaccaagtttgattccgaagtgtacatcctgagcaaagatgaaggtggtcgtcacactccattcttcaaaggctaccgtccacagttctacttccgtacaactgacgtgaccggtactatcgaactgccagaaggcgttgagatggttatgcctggtgacaacgtgaacatggttgttaccctgatccacccaatcgcgatggatgacggtctgcgtttc

SEQ ID NO: 158 - DNA, 830 bp, Salmonella choleraesuis subsp. arizonae
  ref <308>: DATABASE ACCESSION NUMBER: ATCC 13314
cggcgcgatcctggttgttgctgcgactgacggcccgatgccgcagacccgtgagcacatcctgctgggccgtcaggtaggcgttccgtacatcatcgtgttcctgaacaaatgcgacatggttgatgacgaagagctgctggaactggttgaaatggaagttcgtgaacttctgtctcagtacgacttcccgggcgacgatacgccgatcgttcgtggttctgctctgaaagcgctggaaggcgacgcagagtgggaagcgaaaatcatcgaactggctggcttcctggactcttacatcccggaaccagagcgtgcgattgacaagccgttcctgctgccgatcgaagacgtattctccatctccggtcgtggtaccgttgttaccggtcgtgtagaacgcggtatcatcaaagtgggcgaagaagttgaaatcgttggtatcaaagagactcagaagtctacctgtactggcgttgaaatgttccgcaaactgctggacgaaggccgtgccggtgagaacgtaggtgttctgctgcgtggtatcaaacgtgaagaaatcgaacgtggtcaggtactggctaagccgggcaccatcaagccgcacaccaagttcgaatctgaagtgtacattctgtccaaagatgaaggcggccgtcatactccgttcttcaaaggctaccgtccgcagttctacttccgtactactgacgtgactggcaccatcgaactgccggaaggcgtggagatggtaatgccgggcgacaacatcaaaatggttgttaccctgatccacccgatcgcgatggacgacggtctgcgtttcgcaa

SEQ ID NO: 159 - DNA, 832 bp, Salmonella choleraesuis subsp. choleraesuis
  ref <308>: DATABASE ACCESSION NUMBER: ATCC 7001
cggcgcgatcctggttgttgctgcgactgacggyccgatgccgcagacccgtgagcacatcctgctgggtcgtcaggtaggcgttccgtacatcatcgtgttcctgaacaaatgcgacatggttgatgacgaagagctgctggaactggttgaaatggaagttcgtgaacttctgtctcagtacgacttcccgggcgacgacacgccgatcgttcgtggttctgctctgaaagcgctggaaggtgacgcagagtgggaagcgaaaatcatcgaactggctggcttcctggattcttacattccggaaccagagcgtgcgattgacaagccgttcctgctgccgatcgaagacgtattctccatctccggtcgtggtaccgttgttaccggtcgtgtagagcgcggtatcatcaaagtgggygaagaagttgaaatcgttggtatcaaagagactcagaagtctacctgtactggcgttgaaatgttccgcaaactgttggacgaaggccgtgccggtgagaacgtaggtgttctgctgcgtggtatcaaacgtgaagaaatcgaacgtggtcaggtactggctaagccgggcaccatcaagccgcacaccaagttcgaatctgaagtgtacattctgtccaaagatgaaggcggccgtcatactccgttcttcaaaggctaccgtccgcagttctacttccgtactactgacgtgactggcaccatcgaactgccggaaggcgtagagatggtaatgccgggcgacaacatcaaaatggttgttaccctgatccacccgatcgcaatggacgacggtctgcgtttcgcaatc

SEQ ID NO: 160 - DNA, 807 bp, Salmonella choleraesuis subsp. diarizonae
  ref <308>: DATABASE ACCESSION NUMBER: ATCC 43973
cctggttgttgctgcgactgacggcccgatgccgcagacccgtgagcacatcctgctgggtcgtcaggtaggcgttccgtacattatcgtgttcctgaacaaatgcgacatggttgatgacgaagagctgctggaactggtagaaatggaagttcgtgaacttctgtctcagtacgacttcccgggcgacgacacgccaatcgttcgtggttctgctctgaaagcgctggaaggcgacgcagagtgggaagcgaaaatcatcgaactggctggcttcctggattcttacatcccggaaccagagcgtgcgattgacaagccgttcctgctgccgatcgaagacgtattctccatctccggtcgtggtaccgttgttaccggtcgtgtagagcgcggtatcatcaaagtgggcgaagaagttgaaatcgttggtatcaaagagactcagaagtctacctgtactggcgttgaaatgttccgcaarctgctggacgaaggccgtgcwggtgagaacgtaggtgttctgctgcgtggtatcaaacgtgaagaaatcgaacgtggtcaggtactggctaagccgggcaccatcaagccgcacaccaagttcgaatctgaagtgtatattctgtccaaagatgaaggcggccgtcatactccgttcttcaaaggctaccgtccgcagttctacttccgtaccactgacgtgactggcaccatcgaactgccggaaggcgtggagatggtaatgccgggcgacaacatcaaaatggttgttaccctgatccacccgatcgcgatggacgacgg

SEQ ID NO: 161 - DNA, 832 bp, Salmonella choleraesuis subsp. choleraesuis
  ref <308>: DATABASE ACCESSION NUMBER: ATCC 8326
cggcgcgatcctggttgttgctgcgactgacggcccgatgccgcagacccgtgagcacatcctgctgggtcgtcaggtaggcgttccgtacatcatcgtgttcctgaacaaatgcgacatggttgatgacgaagagctgctggaactggttgaaatggaagttcgtgaacttctgtctcagtacgacttcccgggcgacgacactccgatcgttcgtggttctgctctgaaagcgctggaaggcgacgcagagtgggaagcgaaaatcatcgaactggctggcttcctggattcttacatcccggaaccagagcgtgcgattgacaagccgttcctgctgccgatcgaagacgtattctccatctccggtcgtggtaccgttgttaccggtcgtgtagaacgcggtatcatcaaagtgggcgaagaagttgaaatcgttggtatcaaagagactcagaagtctacctgtactggcgttgaaatgttccgcaaactgctggacgaaggccgtgccggtgagaacgtaggtgttctgctgcgtggtatcaaacgtgaagaaatcgaacgtggtcaggtactggctaagccgggcaccatcaagccgcacaccaagttcgaatctgaagtgtacattctgtccaaagatgaaggcggccgtcayactccgttcttcaaaggctaccgtccgcagttctacttccgtactactgacgtgactggcaccatcgaattgccggaaggcgtagagatggtaatgccgggcgacaacatcaaaatggttgttaccctgatccacccgatcgcgatggacgacggtctgcgtttcgcaatc

SEQ ID NO: 162 - DNA, 807 bp, Salmonella choleraesuis subsp. houtenae
  ref <308>: DATABASE ACCESSION NUMBER: ATCC 43974
cctggttgttgctgcgactgacggcccgatgccgcagacccgtgagcacatcctgctgggtcgtcaggtaggcgttccgtacatcatcgtgttcctgaacaaatgcgacatggttgatgacgaagagctgctggaactggtagaaatggaagttcgtgaacttctgtctcagtacgatttcccgggcgacgacacgccgatcgtgcgtggttctgctctgaaagcgctggaaggcgacgcagaatgggaagcgaaaatcatcgaactggctggctacctggattcttacatcccggaaccagagcgtgcgattgacaaaccgttcctgctgccgatcgaagacgtattctctatctccggtcgtggtaccgttgttaccggtcgtgtagagcgcggtatcatcaaagtgggcgaagaagttgaaatcgttggtatcaaagagactcagaagtcgacctgtactggcgttgaaatgttccgcaaactgctggacgaaggccgtgctggcgagaacgtaggtgttctgctgcgtggtatcaaacgtgaagaaatcgaacgtggtcaggtactggctaagccgggcaccatcaagccgcacaccaagttcgaatctgaagtgtacattctgtccaaagatgaaggcggccgtcatactccgttcttcaaaggctaccgtccgcaattctacttccgtacgactgacgtgactggcaccatcgaactgccggaaggcgtggagatggtaatgccgggcgacaacatcaaaatggttgttaccctgatccacccgatcgcgatggacgacgg

SEQ ID NO: 163 - DNA, 827 bp, Salmonella choleraesuis subsp. indica
  ref <308>: DATABASE ACCESSION NUMBER: ATCC 43976
cgcgatcctggttgttgctgcgactgacggcccgatgccgcagacccgtgagcacatcctgctgggtcgtcaggtaggcgttccgtacatcatcgtgttcctgaacaaatgcgacatggttgatgacgaagagctgctggaactggttgaaatggaagttcgtgaacttctgtctcagtacgacttcccgggtgacgacacgccgatcgtgcgtggttctgctctgaaagcgctggaaggcgacgcagagtgggaagcgaaaatcatcgaactggctggcttcctggattcttacattccggaaccagagcgtgcgattgacaagccgttcctgctgccgatcgaagacgtattctccatctccggtcgtggtacygttgttaccggtcgtgtagagcgcggtatcatcaaagtgggcgaagaagttgaaatcgttggtatcaaagagactcagaagtctacctgtactggcgttgaaatgttccgcaaactgctggacgaaggccgtgccggtgagaacgtaggtgttctgctgcgtggtatcaaacgtgaagaaatcgaacgtggtcaggtactggctaagccgggcaccatcaagccgcacaccaagttcgaatctgaagtgtacattctgtccaaagatgaaggcggccgtcatactccgttcttcaaaggctaccgtccgcagttctacttccgtactactgacgtgactggcaccatcgaactgccggaaggcgtagagatggtaatgccgggcgacaacatcaaaatggttgttaccctgatccatccgatcgcratggacgacggtctgcgtttcgcaa

SEQ ID NO: 164 - DNA, 807 bp, Salmonella choleraesuis subsp. salamae
  ref <308>: DATABASE ACCESSION NUMBER: ATCC 43972
cctggttgttgctgcgactgacggcccgatgccgcagacccgtgagcacatcctgctgggtcgtcaggtaggcgttccgtacatcatcgtgttcctgaacaaatgcgacatggttgatgacgaagagctgctggaactggtagaaatggaagttcgtgaacttctgtctcagtacgacttcccgggcgacgacacgccgatcgtgcgtggttccgctctgaaagcgctggaaggcgamgctgagtgggaagmgaaaatcatcgaactggctggctwcctggattcttacattccggaaccagagcgtgcgattgacaagccgttcctgctgccgatcgaagacgtattctccatctccggtcgtggtaccgttgttaccggtcgtgtagagcgcggtatcatcaaagtgggcgaagaagttgaaatcgttggtatcaaagagactcagaagtctacctgtactggcgttgaaatgttccgcaaactgctggacgaaggccgtgccggtgagaacgtaggtgttctgctgcgtggtatcaaacgtgaagaaatcgaacgtggtcaggtactggctaagccgggcaccatcaagccgcacaccaagttcgaatctgaagtgtacattctgtccaaagatgaaggcggccgtcatactccgttcttcaaaggctaccgtccgcagttctacttccgtaccactgacgtgactggcaccatcgaactgccggaaggcgtggagatggtaatgccgggcgacaacatcaaaatggttgttaccctgatccacccgatcgcgatggacgacgg

SEQ ID NO: 165 - DNA, 832 bp, Salmonella choleraesuis subsp. choleraesuis
  misc_feature (1)...(832): n=a,t,c or g
  ref <308>: DATABASE ACCESSION NUMBER: ATCC 10749
cggcgcgatcctggttgttgctgcgactgacggcccgatgccgcagacccgtgagcacatcctgctgggtcgtcaggtaggcgttccgtacatcatcgtgttcctgaacaaatgcgacatggttgatgacgaagagctgctggaactggttgaaatggaagttcgtgaacttctgtctcagtacgacttcccgggcgacgacacgccgatcgttcgtggttctgctctgaaagcgctggaaggcgacgcagagtgggaagcgaaaatcatcgaactggctggcttcctggattcttacatcccggaaccagagcgtgcgattgacaagccgttcctgctgccgatcgaagacgtattctccatctccggtcgtggtaccgttgttaccggtcgtgtagaacgcggtatcatcaaagtgggcgaagaagttgaaatcgttggtatcaaagagactcagaagtctacctgtactggcgttgaaatgttccgcaaactgctggacgaaggccgtgcnggtgagaacgtaggtgttctgctgcgtggtatcaaacgtgaagaaatcgaacgtggtcaggtactggctaagccgggcaccatcaagccgcacacyaagttcgaatctgaagtgtacattctgtccaaagatgaaggcggccgtcatactccgttcttcaaaggctaccgtccgcagttctacttccgtactactgacgtgactggcaccatcgaactgccggaaggcgtagagatggtaatgccgggcgacaacatcaaaatggttgttaccctgatccacccgatcgcaatggacgacggtctgcgtttcgcaatc

SEQ ID NO: 166 - DNA, 817 bp, Serratia fonticola
  DSM 4576
cggcgctatcctggttgtagctgcgactgacggccctatgcctcagactcgtgagcacatcctgctgggtcgtcaggttggcgttccttacatcatcgtattcatgaacaaatgcgacatggttgatgatgaagagctgctggaactggtagaaatggaagttcgtgaacttctgtctgcttatgacttccctggtgatgacctgccggttgttcgtggttcagcgctgaaagcactggaaggcgaagctgagtgggaagctaaaatcatcgagctggccggtcacctggattcctacatcccagaaccagagcgtgctatcgatcagccgttcctgctgccaatcgaagacgtattctccatctccggtcgtggtaccgtagttaccggtcgtgttgagcgcggtatcgttaaagttggcgaagaagttgaaatcgttggtatcaaagacaccgttaagtctacctgtactggcgttgaaatgttccgcaaactgctggacgaaggccgtgctggtgagaacgttggtgttctgctgcgtggtatcaagcgtgaagacatcgaacgtggtcaggtactggctaaaccaggttccatcaagccgcacactcagttcgattcagaagtgtatatcctgagcaaagaagaaggtggtcgtcatactccattcttcaaaggctaccgtccacagttctacttccgtacaactgacgtgaccggtaccatcgaactgccagaaggcgtagagatggtaatgccaggcgataacgtgaacatggttgttaccctgatccacccaatcgctatggaccaaggc

SEQ ID NO: 167 - DNA, 787 bp, Serratia liquefaciens
  ref <308>: DATABASE ACCESSION NUMBER: ATCC 27592
gctgcgactgacggcccaatgcctcagacccgtgagcacatcctgctgggtcgtcaggttggcgttcctttcatcatcgtattcatgaacaaatgcgacatggttgatgatgaagagctgctggaactggtagaaatggaagttcgtgaacttctgtctgcttacgacttccctggtgatgacctgccggttgttcgtggttcagcgctgaaagcactggaaggcgaagctgagtgggaagctaaaatcatcgagctggccggttacctggattcttacatcccagaaccagagcgtgctatcgacaagccgttcctgctgccaatcgaagacgtcttctccatctccggtcgtggtaccgttgttaccggtcgtgttgagcgcggtatcgttaaagttggcgaagaagttgaaatcgttggtatcaaagacaccgttaagtctacctgtactggcgttgaaatgttccgcaaactgctggacgaaggccgtgctggtgagaacgttggtgttctgctgcgtggtatcaagcgtgaagacatcgaacgtggtcaggtactggctaaaccaggttcaatcaagccacacaccaagttcgactcagaagtgtacatcctgagcaaagaagaaggtggtcgtcatactccattcttcaaaggctaccgtccacagttctacttccgtacaactgacgtgaccggtaccatcgaactgccagaaggcgttgaaatggtaatgccaggtgacaacgtgaacatggttgttaccctgatccacccaatcgcga

SEQ ID NO: 168 - DNA, 745 bp, Serratia marcescens
  ref <308>: DATABASE ACCESSION NUMBER: ATCC 13880
gcctcagactcgtgagcacatcctgctgggtcgtcaggttggcgttcctttcatcatcgtattcatgaacaaatgcgacatggttgatgatgaagagctgytggaactggtagaaatggaagttcgcgaactgctgtccgcttacgacttccctggcgacgacctgccggtaatccgcggttccgcgctgaaagcgctggaaggcgaagctgagtgggaagcgaaaatcatcgaactggccgaagccctggacagctacatcccagagccagagcgtgctatcgacaagccgttcctgctgccaatcgaagacgtattctccatctccggtcgtggtaccgttgttaccggtcgtgttgagcgcggcatcatcaaagttggcgaagaagttgaaatcgttggtatcaaagacaccgttaagtctacctgtactggcgttgaaatgttccgcaaactgctggacgaaggccgtgctggtgagaacgtaggtgttctgctgcgtggtatcaaacgtgaagaaatcgaacgtggtcaggtactggctaagccaggctccatcaagccgcacacccagttcgaatctgaagtgtacatcctgagcaaagatgaaggtggtcgtcacackccattcttcaaaggctaccgtccacagttctacttccgtaccactgacgtgaccggtaccatcgaactgccagaaggcgtagagatggtaatgccaggcgacaacgtgaacatggttgta

SEQ ID NO: 169 - DNA, 829 bp, Serratia odorifera
  ref <308>: DATABASE ACCESSION NUMBER: ATCC 33077
ggcgcaatcctggttgttgctgcgactgacggccctatgcctcagacccgtgagcacatcctgctgggtcgccaggttggcgttcctttcatcatcgtgttcatgaacaaatgtgacatggttgatgacgaagagctgctggaactggtagaaatggaagttcgcgagctgctgtctgcttacgatttccctggcgacgacctgccagtaatccgcggttctgcgctgaaagcgctggaaggcgaagcagagtgggaagctaagattgtagaactggctgaagcgctggattcttacatcccagaaccagagcgtgctatcgacaagccgttcctgctgccaatcgaagacgtattctccatctccggtcgtggtaccgttgttaccggtcgtgttgagcgcggtatcatcaaagttggcgaagaagttgaaatcgttggtatcaaagacaccgttaagtctacctgtaccggtgtagaaatgttccgcaaactgctggacgaaggccgtgctggtgagaacgttggtgttctgctgcgtggtatcaagcgtgaagacatcgaacgtggtcaggttctggctaaaccaggttctatcaagccgcacaccaaattcgactcagaagtgtacatcctgagcaaagaagaaggtggtcgtcacacgccattcttcaaaggctaccgtccacagttctacttccgtactactgacgtgaccggtaccatcgaactgccagaaggcgtagagatggtaatgccaggcgataacgtgaacatggttgttaccctgattcacccaatcgcaatggacgacggtctgcgtttcgcaa

SEQ ID NO: 170 - DNA, 830 bp, Serratia plymuthica
  DSM 4540
cggcgcaatcctggttgttgctgcgactgacggcccaatgcctcagacccgtgagcacatcctgctgggtcgtcaggttggcgttcctttcatcatcgtattcatgaacaaatgcgacatggttgatgatgaagagctgctggaactggtagaaatggaagttcgtgaacttctgtctgcttacgacttccctggtgatgacctgccggttgttcgtggttcagcgctgaaagcactggaaggcgaaccagagtgggaagctaaaatcatcgagctggctggtttcctggattcttacatcccagaaccagagcgtgctatcgacaagccgttcctgctgccaatcgaagacgtattctccatctccggtcgtggtaccgttgttaccggtcgtgttgagcgcggtatcgttaaagttggcgaagaagttgaaatcgtgggtatcaaagacaccgttaagtctacctgtaccggcgttgaaatgttccgcaaactgctggacgaaggccgtgctggtgagaacgtgggtgttctgctgcgtggtatcaagcgcgaagatatcgaacgtggtcaggtcctggctaaaccaggttcaatcaagccacacaccaagtttgactcagaagtgtacatcctgagcaaagaagaaggtggtcgtcatactccattcttcaaaggctaccgtccacagttctacttccgtacaactgacgtgaccggtaccatcgaactgccagaaggcgtagagatggtaatgccaggtgacaacgtgaacatggttgtaaccctgatccacccaatcgcgatggacgacggcctgcgtttcgcaa

SEQ ID NO: 171 - DNA, 829 bp, Serratia rubidaea
  ref <308>: DATABASE ACCESSION NUMBER: ATCC 27593
ggcgcaatcctggtagtagcagcgactgacggcccaatgcctcagacccgtgagcacatcctgctgggccgccaggtaggcgtaccttacatcatcgtattcatgaacaaatgcgacatggtagatgatgaagagctgctggaactggtagagatggaagttcgcgaactgctgtctgcttacgacttcccaggcgacgacctgccggtaatccgtggttccgcgctgaaagcgctggaaggcgaagccgagtgggaagcgaaaatcgttgagctggcagaagcgctggacagctacatcccagagccagagcgtgctgtagacaagccgttcctgctgccaatcgaagacgtattctccatctccggtcgtggtaccgttgttaccggtcgtgtagagcgcggtatcatcaaagttggtgaagaagtagaaatcgtaggtatcaaagacaccgttaagtctacctgtactggcgtagaaatgttccgcaaactgctggacgaaggccgtgctggtgagaacgtaggtgttctgctgcgtggtatcaagcgtgaagaaatcgaacgtggtcaggtactggcgaagccaggttcaatcaagccgcacacccagttcgaatctgaagtgtacattctgtccaaagacgaaggcggccgtcatactccgttcttcaaaggctaccgtccacagttctacttccgtacaactgacgtgaccggtaccatcgaactgccagaaggcgtagagatggtaatgccaggcgacaacgtgaacatgaaagttactctgattcacccaatcgcaatggacgacggtctgcgtttcgcaa

SEQ ID NO: 172 - DNA, 826 bp, Shigella boydii
  ref <308>: DATABASE ACCESSION NUMBER: ATCC 9207
cggcgcgatcytggtagttgctgcgactgacggcccgatgccgcagactcgtgagcacatcctgctgggtcgtcaggtaggcgttccgtacatcatcgtgttcctgaacaaatgcgacatggttgatgacgaagagctgctggaactggttgaaatggaagttcgtgaacttctgtctcagtacgacttcccgggcgacgacactccgatcgttcgtggttctgctctgaaagcgctggaaggcgacgcagagtgggaagcgaaaatcctggaactggctggcttcctggattcttacattccggaaccagagcgtgcgattgacaagccgttcctgctgccgatcgaagacgtattctccatctccggtcgtggtaccgttgttaccggtcgtgtagaacgcggtatcatcaaagttggtgaagaagttgaaatcgttggtatcaaagagactcagaagtctacctgtactggcgttgaaatgttccgcaaactgctggacgaaggccgtgctggtgagaacgtaggtgttctgctgcgtggtatcaaacgtgaagaaatcgaacgtggtcaggtactggctaagccgggcaccatcaagccgcacaccaagttcgaatctgaagtgtacattctgtccaaagatgaaggcggccgtcatactccgttcttcaaaggctaccgtccgcagttctacttccgtactactgacgtgactggtaccatcgaactgccggaaggcgtagagatggtaatgccgggcgacaacatcaaaatggttgttaccctgatccacccgatcgcgatggacgacggtctgcgtttc

SEQ ID NO: 173 - DNA, 818 bp, Shigella dysenteriae
  ref <308>: DATABASE ACCESSION NUMBER: ATCC 11835
tggtagttgctgcgactgacggcccgatgccgcagactcgtgagcacatcctgctgggtcgtcaggtaggcgttccgtacatcatcgtgttcctgaacaaatgcgacatggttgatgacgaagagctgctggaactggttgaaatggaagttcgtgaacttctgtctcagtacgacttcccgggcgacgacactccgatcgttcgtggttctgctctgaaagcgctggaaggcgacgcagagtgggaagcgaaaatcctggaactggctggcttcctggattcytayattccggaaccagagcgtgcgattgacaagccgttcctgctgccgatcgaagacgtattctccatctccggtcgtggtaccgttgttaccggtcgtgtagaacgcggtatcatcaaagttggtgaagaagttgaaatcgttggtatcaaagagacycagaagtctacctgtactggcgttgaaatgttccgcaaactgctggacgaaggccgtgctggtgagaacgtaggtgttctgctgcgtggtatcaaacgtgaagaaatcgaacgtggtcaggtactggcgaagccrggcaccatcaagccgcacaccaagttcgaatctgaagtgtacattctgtccaaagatgaaggcggccgtcatactccgttcttcaaaggctaccgtccgcagttctacttccgtactactgacgtgactggtaccatcgaactgccggaaggcgtagagatggtaatgccgggcgacaacatcaaaatggttgttaccctgatccacccgatcgcgatggacgacggtctgcgtttcgca

SEQ ID NO: 174 - DNA, 806 bp, Shigella flexneri
  ref <308>: DATABASE ACCESSION NUMBER: ATCC 12022
cctggtagttgctgcgactgacggcccgatgccgcagactcgtgagcacatcctgctgggtcgtcaggtaggcgttccgtacatcatcgtgttcctgaacaaatgcgacatggttgatgacgaagagctgctggaactggttgaaatggaagttcgtgaacttctgtctcagtacgacttcccgggcgacgacactccgatcgttcgtggttctgctctgaaagcgctggaaggcgacgcagagtgggaagcgaaaatcctggaactggctggcttcctggattcttacattccggaaccagagcgtgcgattgacaagccgttcctgctgccgatcgaagacgtattctccatctccggtcgtggtaccgttgttaccggtcgtgtagaacgcggtatcatcaaagttggtgaagaagttgaaatcgttggtatcaaagagactcagaagtctacctgtactggcgttgaaatgttccgcaaactgctggacgaaggccgtgctggtgagaacgtaggtgttctgctgcgtggtatcaaacgtgaagaaatcgaacgtggtcaggtactggctaagccgggcaccatcaagccgcacaccaagttcgaatctgaagtgtacattctgtccaaagatgaaggcggmcgtcatactccgttcttcaaaggctaccgtccgcagttctacttccgtactactgacgtgactggtaccatcgaactgccggaaggcgtagagatggtaatgccgggcgacaacatcaaaatggttgttaccctgatccacccgatcgcgatggacgacg

SEQ ID NO: 175 - DNA, 832 bp, Shigella sonnei
  ref <308>: DATABASE ACCESSION NUMBER: ATCC 29930
cggcgcgatcctggtagttgctgcgactgacggcccgatgccgcagactcgtgagcacatcctgctgggtcgtcaggtaggcgttccgtacatcatcgtgttcctgaacaaatgcgacatggttgatgacgaagagctgctggaactggttgaaatggaagttcgtgaacttctgtctcagtacgacttcccgggcgacgacactccgatcgttcgtggttctgctctgaaagcgctggaaggcgacgcagagtgggaagcgaaaatcctggaactggctggcttcctggattcttacattccggaaccagagcgtgcgattgacaagccgttcctgctgccgatcgaagacgtattctccatctccggtcgtggtaccgttgttaccggtcgtgtagaacgcggtatcatcaaagttggtgaagaagttgaaatcgttggtatcaaagagactcagaagtctacctgtactggcgttgaaatgttccgcaaactgctggacgaaggccgtgctggtgagaacgtaggtgttctgctgcgtggtatcaaacgtgaagaaatcgaacgtggtcaggtactggctaagccgggcaccatcaagccgcacaccaagttcgaatctgaagtgtacattctgtccaaagatgaaggcggycgtcatactccgttcttcaaaggctaccgtccgcagttctacttccgtactactgacgtgactggtaccatcgaactgccggaaggcgtagagatggtaatgccgggcgacaacatcaaaatggttgttaccctgatccacccgatcgcgatggacgacggtctgcgtttcgcaatc

SEQ ID NO: 176 - DNA, 716 bp, Staphylococcus aureus
  ref <308>: DATABASE ACCESSION NUMBER: ATCC 13301
tctgctgctgacggtccaatgccacaaactcgtgaacacattcttttatcacgtaacgttggtgtaccagcattagtagtattcttaaacaaagttgacatggttgacgatgaagaattattagaattagtagaaatggaagttcgtgacttattaagcgaatatgacttcccaggtgacgatgtacctgtaatcgctggttcagcattaaaagctttagaaggcgatgctcaatacgaagaaaaaatcttagaattaatggaagctgtagatacttacattccaactccagaacgtgattctgacaaaccattcatgatgccagttgaggacgtattctcaatcactggtcgtggtactgttgctacaggccgtgttgaacgtggtcaaatcaaagttggtgaagaagttgaaatcatcggtttacatgacacatctaaaacaactgttacaggtgttgaaatgttccgtaaattattagactacgctgaagctggtgacaacattggtgcattattacgtggtgttgctcgtgaagacgtacaacgtggtcaagtattagctgctcctggttcaattacaccacatactgaattcaaagcagaagtatacgtattatcaaaagacgaaggtggacgtcacactccattcttctcaaactatcgtccacaattctatttccgtactactgacgtaactggtgttgttcacttacc

SEQ ID NO: 177 - DNA, 719 bp, Staphylococcus aureus
  ref <308>: DATABASE ACCESSION NUMBER: ATCC 29247
ttcttttatcacgtaacgttggtgtaccagcattagtagtattcttaaacaaagttgacatggttgacgatgaagaattattagaattagtagaaatggaagttcgtgacttattaagcgaatatgacttcccaggtgacgatgtacctgtaatcgctggttcagcattaaaagctttagaaggcgatgctcaatacgaagaaaaaatcttagaattaatggaagctgtagatacttacattccaactccagaacgtgattctgacaaaccattcatgatgccagttgaggacgtattctcaatcactggtcgtggtactgttgctacaggccgtgttgaacgtggtcaaatcaaagttggtgaagaagttgaaatcatcggtttacatgacacatctaaaacaactgttacaggtgttgaaatgttccgtaaattattagactacgctgaagctggtgacaacattggtgcattattacgtggtgttgctcgtgaagacgtacaacgtggtcaagtattagctgctcctggttcaattacaccacatactgaattcaaagcagaagtatacgtattatcaaaagacgaaggtggacgtcacactccattcttctcaaactatcgtccacaattctatttccgtactactgacgtaactggtgttgttcacttaccagaaggtmctgaaatggtaatgcctggtgataacgttgaaatg

SEQ ID NO: 178 - DNA, 625 bp, Staphylococcus aureus
  ref <308>: DATABASE ACCESSION NUMBER: ATCC 33591
gtgaacacattcttttatcacgtaacgttggtgtaccagcattagtagtattcttaaacaaagttgacatggttgacgatgaagaattattagaattagtagaaatggaagttcgtgacttattaagcgaatatgacttcccaggtgacgatgtacctgtaatcgctggttcagcattaaaagctttagaaggcgatgctcaatacgaagaaaaaatcttagaattaatggaagctgtagatacttacattccaactccagaacgtgattctgacaaaccattcatgatgccagttgaggacgtattctcaatcactggtcgtggtactgttgctacaggccgtgttgaacgtggtcaaatcaaagttggtgaagaagttgaaatcatcggtttacatgacacatctaaaacaactgttacaggtgttgaaatgttccgtaaattattagactacgctgaagctggtgacaacattggtgcattattacgtggtgttgctcgtgaagacgtacaacgtggtcaagtattagctgctcctggttcaattacaccacatactgaattcaaagcagaagtatacgtattatcaaaagacgaaggtggacgtcacactccattcttctc

SEQ ID NO: 179 - DNA, 704 bp, Staphylococcus aureus
  ref <308>: DATABASE ACCESSION NUMBER: ATCC 43300
gttggtgtaccagcattagtagtattcttaaacaaagttgacatggttgacgatgaagaattattagaattagtagaaatggaagttcgtgacttattaagcgaatatgacttcccaggtgacgatgtacctgtaatcgctggttcagcattaaaagctttagaaggcgatgctcaatacgaagaaaaaatcttagaattaatggaagctgtagatacttacattccaactccagaacgtgattctgacaaaccattcatgatgccagttgaggacgtattctcaatcactggtcgtggtactgttgctacaggccgtgttgaacgtggtcaaatcaaagttggtgaagaagttgaaatcatcggtttacatgacacatctaaaacaactgttacaggtgttgaaatgttccgtaaattattagactacgctgaagctggtgacaacattggtgcattattacgtggtgttgctcgtgaagacgtacaacgtggtcaagtattagctgctcctggttcaattacaccacatactgaattcaaagcagaagtatacgtattatcaaaagacgaaggtggacgtcacactccattcttctcaaactatcgtccacaattctatttccgtactactgacgtaactggtgttgttcacttaccagaaggtactgaaatggtaatgcctggtgataacgttgaaatgac

SEQ ID NO: 180 - DNA, 730 bp, Staphylococcus aureus subsp. aureus
  ref <308>: DATABASE ACCESSION NUMBER: ATCC 6538
gtgaacacattcttttatcacgtaacgttggtgtaccagcattagtagtattcttaaacaaagttgacatggttgacgatgaagaattattagaattagtagaaatggaagttcgtgacttattaagcgaatatgacttcccaggtgacgatgtacctgtaatcgctggttcagcattaaaagctttagaaggcgatgctcaatacgaagaaaaaatcttagaattaatggaagctgtagatacttacattccaactccagaacgtgattctgacaaaccattcatgatgccagttgaggacgtattctcaatcactggtcgtggtactgttgctacaggccgtgttgaacgtggtcaaatcaaagttggtgaagaagttgaaatcatcggtttacatgacacatctaaaacaactgttacaggtgttgaaatgttccgtaaattattagactacgctgaagctggtgacaacattggtgcattattacgtggtgttgctcgtgaagacgtacaacgtggtcaagtattagctgctcctggttcaattacaccacatactgaattcaaagcagaagtatacgtattatcaaaagacgaaggtggacgtcacactccattcttctcaaactatcgtccacaattctatttccgtactactgacgtaactggtgttgttcacttaccagaaggtactgaaatggtaatgcctggtgataacgttgaaatgac

SEQ ID NO: 181 - DNA, 834 bp, Staphylococcus auricularis
  ref <308>: DATABASE ACCESSION NUMBER: ATCC 33753
cggtgcgatcttagttgtatctgcagctgatggtccaatgccacaaactcgtgaacacatcttattatcacgtaacgttggtgtaccagcattagttgtattcttaaacaaagttgaccaagttgacgacgaagaattattagaattagtagaaatggaagttcgtgacttattaagcgaatacgactacccaggtgacgatgtacctgtaatctctggttctgcgttgaaagcattagaaggcgacaaagaatacgaacaaaaaatcttagacttaatgcaacaagttgacgattacattccaactccagaacgtgactctgataaaccattcatgatgccagttgaagacgtattctcaatcactggtcgtggtactgttgcaacaggccgtgttgaacgtggtcaaatcaaagtcggtgaagaagttgaaatcatcggtatgaaagacggttcacaaaaaacaacagttactggtgtagaaatgttccgtaaattattagactacgctgaagctggtgacaacatcggtgctttattacgtggtatttcacgtgaagaagtacaacgtggtcaagttttagctgctcctggttcaattacaccacacactaaattcactgcagaagtttacgtattatctaaagatgaaggtggacgtcacactccattcttctctaactaccgtccacaattctatttccgtactactgacgtaacaggtgttgttactttaccagaaggtacagaaatggtaatgcctggcgataacgttaaaatggaagttgaattaatttctccaatcgctatcgaagacggtactcgtttctcaat

SEQ ID NO: 182 - DNA, 835 bp, Staphylococcus capitis subsp. capitis
  ref <308>: DATABASE ACCESSION NUMBER: ATCC 27840
cggcggtatcttagtagtatctgctgctgacggtccaatgccacaaactcgtgaacacatcttattatcacgtaacgttggtgtaccagcattagttgtattcttaaacaaagttgacatggtagacgacgaagaattattagaattagttgaaatggaagttcgtgacttattaagcgaatatgacttcccaggtgatgatgtacctgtaatcgctggttcagcattaaaagctttagaaggcgatgctcaatacgaagaaaaaatcttagaattaatgcaagcagttgatgattacattccaactccagaacgtgattctgacaaaccattcatgatgccagttgaggacgtattctcaatcactggtcgtggtactgttgctacaggccgtgttgaacgtggtcaaatcaaagttggtgaagaagttgaaatcatcggtatccacgaaacttctaaaacaactgttactggtgtagaaatgttccgtaaattattagactacgctgaagctggtgacaacatcggtgctttattacgtggtgttgctcgtgaagacgtacaacgtggtcaagtattagctgctcctggttcaatcacaccacacactaaattcaaagcggaagtttacgttttatctaaagacgaaggtggacgtcacactccattcttcagtaactaccgcccacaattctatttccgtactactgacgtaactggtgttgttaacttaccagaaggtactgaaatggttatgcctggcgacaacgttgaaatgacagttgaattaatcgctcctatcgctattgaagacggtactcgtttctcaatcgga

SEQ ID NO: 183 - DNA, 804 bp, Macrococcus caseolyticus
  ref <308>: DATABASE ACCESSION NUMBER: ATCC 13548
gtatcttagtagtatctgctgctgacggtccaatgccacaaactcgtgaacacatccttttatcacgtaacgttggtgtaccagcattagtagtattcttgaacaaagttgacatggttgacgatgaagaattattagaattagttgaaatggaagttcgtgacttattatctgaatatgacttccctggtgacgatgtacctgtaatcgctggatctgctttaaaagcattagaaggcgttgaagaatacgaagacaaaatcatggaattaatggacgcagttgatgagtacatcccaactccagaacgtgattctgacaaaccattcatgatgccagttgaggacgtattctcaatcactggtcgtggtacagttgcaactggacgtgttgagcgtggacaagttaaagttggtgaagaagttgaaatcattggtttaactgaagaaccagcaaaaactacagttacaggtgtagaaatgttccgtaaattattagattacgctgaagctggagataacatcggtgctttattacgtggtgtttctcgtgaagacgtacaacgtggacaagtattagctaaaccaggttcaattactccacatactaaattcaaagctgaagtttacgtattatctaaagaagaaggtggacgtcatactccattcttcactaactaccgccctcagttctacttccgtacaactgacgtaactggtgtagttaacttaccagaaggtactgaaatggtaatgcctggagataacatcgaaatgaacgttgaattaatttctccaatcgcga

SEQ ID NO: 184 - DNA, 832 bp, Staphylococcus cohnii
  DSM 20260
cggagctatcttagtagtatctgctgctgatggcccaatgccacaaactcgtgaacatatccttttatcacgtaacgttggtgttccagcattagttgtattcttaaacaaagttgacatggttgacgatgaagaattattagaattagtagaaatggaagttcgtgacttattaagcgaatatgacttcccaggtgacgatgtacctgtaatctctggttcagcattaaaagctcttgaaggcgacgctgactatgagcaaaaaatcttagacttaatgcaagctgttgatgacttcattccaacaccagaacgtgattctgacaaaccattcatgatgccagttgaggacgtattctcaatcactggtcgtggtactgttgctacagggcgtgttgaacgtggtcaaatcaaagtcggtgaagaagttgaaatcatcggtatgcaagaagattcaagcaaaacaactgttactggtgtagaaatgttccgtaaattattagactacgctgaagctggtgacaacattggtgcgttattacgtggtgttgcacgtgaagacatccaacgtggtcaagttttagctgctcctggttcaattacaccacacacaaactttaaagcggaagtttacgttttatcaaaagatgaaggtggccgtcatacgccattcttcagtaactatcgcccacaattctatttccgtactactgacgtaacaggtgttgttactttaccagaaggtactgaaatggttatgcctggcgacaacgtagaaatggaagttgaactaatttctccaatcgctatcgaagacggtacacgtttctct

SEQ ID NO: 185 - DNA, 699 bp, Staphylococcus epidermidis
  strain CSG 269
atctgctgctgacggtccaatgccacaaactcgtgaacacatcttattatcacgtaacgttggtgtaccagcattagttgtattcttaaacaaagttgacatggtagacgacgaagaattattagaattagttgaaatggaagttcgtgacttattaagcgaatatgacttcccaggtgacgatgtacctgtaatcgctggttctgcattaaaagcattagaaggcgatgctgaatacgaacaaaaaatcttagacttaatgcaagcagttgatgattacattccaactccagaacgtgattctgacaaaccattcatgatgccagttgaggacgtattctcaatcactggtcgtggtactgttgctacaggccgtgttgaacgtggtcaaatcaaagttggtgaagaagttgaaatcatcggtatgcacgaaacttctaaaacaactgttactggtgtagaaatgttccgtaaattattagactacgctgaagctggtgacaacatcggtgctttattacgtggtgttgcacgtgaagacgtacaacgtggtcaagtattagctgctcctggttctattacaccacacacaaaattcaaagctgaagtatacgtattatctaaagatgaaggtggacgtcacactccattcttcactaactatcgcccacaattctatttccgtactactgacgtaac

SEQ ID NO: 186 - DNA, 829 bp, Staphylococcus haemolyticus
  ref <308>: DATABASE ACCESSION NUMBER: ATCC 29970
cggcggtatcttagtagtatctgctgctgacggtccaatgccacaaactcgtgaacacattcttttatcacgtaacgttggtgtaccagcattagtagtattcttaaataaagttgacatggttgacgatgaagaattattagaattagttgaaatggaagtacgtgacttattatctgaatacgacttcccaggtgacgatgtacctgtaatcgctggttcagcattaaaagctttagaaggcgatgctcaatacgaagaaaaaatcttagaattaatgcaagcagttgatgactacattccaactccagaacgtgattctgacaaaccattcatgatgccagttgaggacgtattctcaatcactggtcgtggtactgttgctacaggccgtgttgaacgtgggcaaatcaaagttggtgaagaagttgaaatcattggtatccatgacacttctaaaacaactgttactggtgtagaaatgttccgtaaattattagactacgctgaagctggtgacaacatcggtgcattattacgtggtgttgctcgtgaagacgtacaacgtggtcaagtattagctgctccaggttcaatcacacctcacacaaaatttaaagcagacgtatacgttttatctaaagacgaaggtggacgtcacactccattcttcacaaactatcgtccacaattctatttccgtactactgacgtaactggtgttgttaacttaccagaaggtactgaaatggttatgcctggcgacaacgttgaaatgacagtagaattaatcgctcctatcgcgattgaagacggtactcgtttctca

SEQ ID NO: 187 - DNA, 705 bp, Staphylococcus warneri
  strain CSG 123
cacaaactcgtgaacacattcttttatcacgtaacgttggtgtaccagctttagttgtattcttaaacaaagttgatatggtagacgacgaagaattattagaattagtagaaatggaagttcgtgacttattatctgaatatgacttcccaggtgacgacgtacctgtaatcgctggttcagcattaaaagctttagaaggcgacgaaaaatacgaagaaaaaatcttagaattaatgcaagcagttgatgactacattccaactccagaacgtgattctgacaaaccattcatgatgccagttgaggacgtattctcaatcactggtcgtggtactgttgctacaggccgtgttgaacgtggtcaaatcaaagttggtgaagaagttgaaatcatcggtttacatgacacttctaaaacaactgttactggtgtagaaatgttccgtaagttattagactacgctgaagctggtgacaacatcggtgctttattacgtggtgttgctcgtgaagacgtacaacgtggtcaagtattagctgctcctggttcaattacaccacatacaaaattcaaagcggaagtttacgttttatctaaagacgaaggtggacgtcacactccattcttcagtaactaccgcccacaattctatttccgtactactgacgtaactggcgttgttcaattaccagaaggtactg

SEQ ID NO: 188 - DNA, 678 bp, Staphylococcus haemolyticus
  strain CSG 23
ttttatcacgtaacgttggtgtaccagcattagtagtattcttaaacaaagttgacatggttgacgatgaagaattattagaattagttgaaatggaagtacgtgacttattatctgaatacgacttcccaggtgacgacgtacctgtaatcgctggttcagctttaaaagctttagaaggcgatgctcaatacgaagaaaaaatcttagaattaatgcaagcagttgatgattacattccaactccagaacgtgactctgataaaccattcatgatgccagttgaggacgtattctcaatcactggtcgtggtactgttgctacaggtcgtgttgaacgtggtcaaatcaaagttggtgaagaagttgaaattattggtatcaaagaaacttctaaaacaactgttactggtgtagaaatgttccgtaaattattagactacgctgaagctggtgacaacatcggtgctttattacgtggtgttgctcgtgaagatgtacaacgtggtcaagtattagctgctccaggttcaattacacctcacacaaaattcaaagcagacgtatacgttttatcaaaagatgaaggtggacgtcatactccattcttcactaactatcgtccacaattctatttccgtactactgacgtaactggtgttgttaacttaccagaag

SEQ ID NO: 189 - DNA, 668 bp, Staphylococcus haemolyticus
  strain CSG 33
accagcattagtagtattcttaaataaagttgacatggttgacgatgaagaattattagaattagttgaaatggaagtacgtgacttattatctgaatacgacttcccaggtgacgatgtacctgtaatcgctggttcagcattaaaagctttagaaggcgatgctcaatacgaagaaaaaatcttagaattaatgcaagcagttgatgactacattccaactccagaacgtgattctgacaaaccattcatgatgccagttgaggacgtattctcaatcactggtcgtggtactgttgctacaggccgtgttgaacgtggtcaaatcaaagttggtgaagaagttgaaatcattggtatccatgacacttctaaaacaactgttactggtgtagaaatgttccgtaaattattagactacgctgaagctggtgacaacatcggtgcattattacgtggtgttgctcgtgaagacgtacaacgtggtcaagtattagctgctccaggttcaatcacacctcacacaaaatttaaagcagacgtatacgttttatctaaagacgaaggtggacgtcacactccattcttcacaaactatcgtccacaattctatttccgtactactgacgtaactggtgttgttaacttaccagaaggtactgaaatgg

SEQ ID NO: 190 - DNA, 593 bp, Staphylococcus haemolyticus
  strain CSG 8
aaagttgacatggttgacgatgaagaattattagaattagttgaaatggaagtacgtgacttattatctgaatacgacttcccaggtgacgatgtacctgtaatcgctggttcagcattaaaagctttagaaggcgatgctcaatacgaagaaaaaatcttagaattaatgcaagcagttgatgattacattccaactccagaacgtgattctgacaaaccattcatgatgccagttgaggacgtattctcaatcactggtcgtggtactgttgctacaggccgtgttgaacgtggtcaaatcaaagttggtgaagaagttgaaatcattggtatccatgacacttctaaaacaactgttactggtgtagaaatgttccgtaaattattagactacgctgaagctggtgacaacattggtgcattattacgtggtgttgctcgtgaagacgtacaacgtggtcaagtattagctgctccaggttcaatcacacctcacacaaaatttaaagcagacgtatacgttttatctaaagacgaaggtggacgtcacactccattcttcacaaactatcgtccacaattctatttccg

SEQ ID NO: 191 - DNA, 828 bp, Staphylococcus hominis subsp. hominis
  ref <308>: DATABASE ACCESSION NUMBER: ATCC 27844
cggcgctatcttagtagtatctgctgctgatggtccaatgccacaaactcgtgaacacattcttttatcacgtaacgttggtgtaccagcattagtagtattcttaaacaaagttgacatggttgacgatgaagaattattagaattagttgaaatggaagtacgtgacttattatctgaatacgacttcccaggtgacgacgtacctgtaatcgctggttcagctttaaaagctttagaaggcgatgctcaatacgaagaaaaaatcttagaattaatgcaagcagttgatgattatattccaactccagaacgtgactctgataaaccattcatgatgccagttgaggacgtattctcaatcactggtcgtggtactgttgctacaggccgtgttgaacgtggtcaaatcaaagttggtgaagaagttgaaattattggtatcaaagaaacttctaaaacaactgttactggtgtagaaatgttccgtaaattattagactacgctgaagctggtgacaacatcggtgctttattacgtggtgttgctcgtgaagatgtacaacgtggtcaagtattagctgctccaggttcaattacacctcacacaaaattcaaagcagacgtatacgttttatcaaaagatgaaggtggacgtcatactccattcttctctaactatcgtccacaattctatttccgtactactgacgtaactggtgttgttaacttaccagaaggtactgaaatggtaatgcctggtgacaacgttgaaatgacagtagaattaatcgctcctatcgcgattgaagacggtactcgtttctc

SEQ ID NO: 192 - DNA, 620 bp, Staphylococcus warneri
  ref <308>: DATABASE ACCESSION NUMBER: ATCC 35982
atggtccaatgccacaaactcgtgaacacattcttttatcacgtaacgttggtgtaccagctttagttgtattcttaaacaaagttgatatggtagacgacgaagaattattagaattagtagaaatggaagttcgtgacttattatctgaatatgacttcccaggtgacgacgtacctgtaatcgctggttcagcattaaaagctttagaaggcgacgaaaaatacgaagaaaaaatcttagaattaatgcaagcagttgatgactacattccaactccagaacgtgattctgacaaaccattcatgatgccagttgaggacgtattctcaatcactggtcgtggtactgttgctacaggccgtgttgaacgtggtcaaatcaaagttggtgaagaagttgaaatcatcggtttacatgacacttctaaaacaactgttactggtgtagaaatgttccgtaagttattagactacgctgaagctggtgacaacatcggtgctttattacgtggtgttgctcgtgaagacgtacaacgtggtcaagtattagctgctcctggttcaattacaccacatacaaaattcaaagcggaagtttacgttttatctaaagacgaa

SEQ ID NO: 193 - DNA, 692 bp, Staphylococcus hominis
  strain CSG 170
ccagcattagtagtattcttaaacaaagttgacatggttgacgatgaagaattattagaattagttgaaatggaagtacgtgacttattatctgaatacgacttcccaggtgacgacgtacctgtaatcgctggttcagctttaaaagctttagaaggcgatgctcaatacgaagaaaaaatcttagaattaatgcaagcagttgatgattatattccaactccagaacgtgactctgataaaccattcatgatgccagttgaggacgtattctcaatcactggtcgtggtactgttgctacaggccgtgttgaacgtggtcaaatcaaagttggtgaagaagttgaaattattggtatcaaagaaacttctaaaacaactgttactggtgtagaaatgttccgtaaattattagactacgctgaagctggtgacaacatcggtgctttattacgtggtgttgctcgtgaagatgtacaacgtggtcaagtattagctgctccaggttcaattacacctcacacaaaattcaaagcagacgtatacgttttatcaaaagatgaaggtggacgtcatactccattcttctctaactatcgtccacaattctatttccgtactactgacgtaactggtgttgttaacttaccagaaggtactgaaatggtaatgcctggtgacaacgttgaaat

SEQ ID NO: 194 - DNA, 684 bp, Staphylococcus hominis
  strain CSG 36
cattcttttatcacgtaacgttggtgtaccagcattagtagtattcttaaacaaagttgacatggttgacgatgaagaattattagaattagttgaaatggaagtacgtgacttattatctgaatacgacttcccaggtgacgacgtacctgtaatcgctggttcagctttaaaagctttagaaggcgatgctcaatacgaagaaaaaatcttagaattaatgcaagcagttgatgattatattccaactccagaacgtgactctgataaaccattcatgatgccagttgaggacgtattctcaatcactggtcgtggtactgttgctacaggccgtgttgaacgtggtcaaatcaaagttggtgaagaagttgaaattattggtatcaaagaaacttctaaaacaactgttactggtgtagaaatgttccgtaaattattagactacgctgaagctggtgacaacatcggtgctttattacgtggtgttgctcgtgaagatgtacaacgtggtcaagtattagctgctccaggttcaattacacctcacacaaaattcaaagcagacgtatacgttttatcaaaagatgaaggtggacgtcatactccattcttctctaactatcgtccacaattctatttccgtactactgacgtaactggtgttgttaacttaccagaagg

SEQ ID NO: 195 - DNA, 685 bp, Staphylococcus hominis
  strain CSG 6
accagcattagtagtattcttaaacaaagttgacatggttgacgatgaagaattattagaattagttgaaatggaagtacgtgacttattatctgaatacgacttcccaggtgacgacgtacctgtaatcgctggttcagctttaaaagctttagaaggcgatgctcaatacgaagaaaaaatcttagaattaatgcaagcagttgatgattacattccaactccagaacgtgactctgataaaccattcatgatgccagttgaggacgtattctcaatcactggtcgtggtactgttgctacaggccgtgttgaacgtggtcaaatcaaagttggtgaagaagttgaaattattggtatcaaagaaacttctaaaacaactgttactggtgtagaaatgttccgtaaattattagactacgctgaagctggtgacaacatcggtgctttattacgtggtgttgctcgtgaagatgtacaacgtggtcaagtattagctgctccaggttcaattacacctcacacaaaattcaaagcagacgtatacgttttatcaaaagatgaaggtggacgtcatactccattcttcactaactatcgtccacaattctatttccgtactactgacgtaactggtgttgttaacttaccagaaggtactgaaatggtaatgcctggcgacaac

SEQ ID NO: 196 - DNA, 611 bp, Staphylococcus hominis
  strain CSG 62
gacttattatctgaatacgacttcccaggtgacgacgtacctgtaatcgctggttcagctttaaaagctttagaaggcgatgctcaatacgaagaaaaaatcttagaattaatgcaagcagttgatgattacattccaactccagaacgtgactctgataaaccattcatgatgccagttgaggacgtattctcaatcactggtcgtggtactgttgctacaggccgtgttgaacgtggtcaaatcaaagttggtgaagaagttgaaattattggtatcaaagatacttctaaaacaactgttactggtgtagaaatgttccgtaaattattagactacgctgaagctggtgacaacatcggtgctttattacgtggtgttgctcgtgaagatgtacaacgtggtcaagtattagctgctccaggttcaatcacacctcacacaaaattcaaagcagacgtatatgttttatcaaaagatgaaggtggacgtcatactccattcttcactaactatcgtccacaattctatttccgtactactgacgtaactggtgttgttaacttaccagaaggtactgaaatggtaatgcctggcgacaacgttgaaat

SEQ ID NO: 197 - DNA, 828 bp, Staphylococcus lugdunensis
  ref <308>: DATABASE ACCESSION NUMBER: ATCC 43809
cggcggtatcttagtagtttctgctgcagatggtccaatgccacaaactcgtgaacacattcttttatcacgtaacgttggtgtgccagcattagtagtattcttaaacaaagttgacatggttgacgatgaagaattattagaattagtagaaatggaagttcgtgatttattaactgaatatgacttcccaggtgacgatgtgcctgtaatcgctggttcagcattaaaagctttagaaggcgacgaaaaatacgaagctaaaatcttagaattaatggatgcagttgataactacattccaactccagaacgtgactctgacaaaccattcatgatgccagttgaggacgtattctcaatcactggtcgtggtactgttgctacaggccgtgttgaacgtggtcaaatcaaagtcggtgaagaagttgaaattattggtatccacgatactactaaaacaactgttactggtgtagaaatgttccgtaaattattagactacgctgaagctggtgacaacatcggtgcgttattacgtggtgttgctcgtgaagatgtacaacgtggacaagtattagctgctccaggttcaattacacctcacactaaatttaaagctgacgtatatgttttatctaaagatgaaggtggacgtcatacaccattcttctcaaactaccgcccacaattctatttccgtactacagacgtaactggtgttgttaacttaccagaaggtacagaaatggttatgcctggcgacaacgttgaaatgacagttgaattaatcgctccaatcgctatcgaagacggaactcgtttctc

SEQ ID NO: 198 - DNA, 690 bp, Staphylococcus saprophyticus
  ref <308>: DATABASE ACCESSION NUMBER: ATCC 35552
agtagtatctgctgctgatggcccaatgccacaaactcgtgaacacattcttttatcacgtaacgttggtgttccagcattagttgtattcttaaacaaagttgacatggttgacgatgaagaattattagaattagtagaaatggaagttcgtgacttattaagcgaatatgacttcccaggtgacgatgtacctgtaatctctggttctgcattaaaagctttagaaggcgacgctgactatgagcaaaaaatcttagacttaatgcaagctgttgatgacttcattccaacaccagaacgtgattctgacaaaccattcatgatgccagttgaggacgtattctcaatcactggtcgtggtactgttgctacaggccgtgttgaacgtggtcaaatcaaagtcggtgaagaaatcgaaatcatcggtatgcaagaagaatcaagcaaaacaactgttactggtgtagaaatgttccgtaaattattagactacgctgaagctggtgacaacattggtgcattattacgtggtgtttcacgtgatgacgtacaacgtggtcaagttttagctgctcctggtactattacaccacatacaaaattcaaagcggatgtttacgttttatctaaagatgaaggtggtcgtcatacaccattcttcactaactaccgcccacaattctattt

SEQ ID NO: 199 - DNA, 723 bp, Staphylococcus saprophyticus
  strain CSG 83
gcattagttgtattcttaaacaaagttgacatggttgacgatgaagaattattagaattagtagaaatggaagttcgtgatttattaagcgaatatgacttcccaggtgacgatgtacctgtaatctctggttctgcattaaaagctttagaaggcgacgctgactatgagcaaaaaatcttagacttaatgcaagctgttgatgacttcattccaacaccagaacgtgattctgacaaaccattcatgatgccagttgaggacgtattctcaatcactggtcgtggtactgttgctacaggccgtgttgaacgtggtcaaatcaaagtcggtgaagaaatcgaaatcatcggtatgcaagaagaatcaagcaaaacaactgttactggtgtagaaatgttccgtaaattattagactacgctgaagctggtgacaacattggtgcattattacgtggtgtttcacgtgatgacgtacaacgtggtcaagttttagctgctcctggtactattacaccacatacaaaattcaaagcggatgtttacgttttatctaaagatgaaggtggtcgtcatacaccattcttcactaactaccgcccacaattctatttccgtactactgacgtaactggtgttgttaacttaccagaaggtactgaaatggttatgcctggcgataacgttgaaatggatgttgaattaatttctccaatcgctatt

SEQ ID NO: 200 - DNA, 697 bp, Staphylococcus saprophyticus
  strain CSsa 18
cgttggtgttccagcattagttgtattcttaaacaaagttgacatggttgacgatgaagaattattagaattagtagaaatggaagttcgtgacttattaagcgaatatgacttcccaggtgacgatgtacctgtaatctctggttctgcattaaaagctttagaaggcgacgctgactatgagcaaaaaatcttagacttaatgcaagctgttgatgacttcattccaacaccagaacgtgattctgacaaaccattcatgatgccagttgaggacgtattctcaatcactggtcgtggtactgttgctacaggccgtgttgaacgtggtcaaatcaaagtcggtgaagaaatcgaaatcatcggtatgcaagaagaatcaagcaaaacaactgttactggtgtagaaatgttccgtaaattattagactacgctgaagctggtgacaacattggtgcattattacgtggtgtttcacgtgatgacgtacaacgtggtcaagttttagctgctcctggtactattacaccacatacaaaattcaaagcggatgtttacgttttatctaaagatgaaggtggtcgtcatacaccattcttcactaactaccgcccacaattctatttccgtactactgacgtaactggtgttgttaacttaccagaaggtactgaaatggttatgcctggcgataac

SEQ ID NO: 201 - DNA, 835 bp, Staphylococcus sciuri subsp. sciuri
  ref <308>: DATABASE ACCESSION NUMBER: ATCC 29060
cggcggtatcttagtagtatctgctgctgacggtccaatgcctcaaactcgtgagcacattcttttatcacgtaacgtaggtgttcctgcattagtagtattcttaaacaaagttgacatggttgacgatgaagaattattagaattagttgaaatggaagttcgtgacttattatctgaatatgacttcccaggcgacgacgttcctgtaattgctggttcagcattaaaagcattagaaggcgacgaagcttacgaagacaaaatcatggaattaatggatgctgttgatacattcatcccaactccagaacgtgactctgacaaaccattcatgatgccagttgaggacgtattctcaatcactggtcgtggtactgttgctacaggccgtgttgaacgtggtcaaatcactgttggtgaagaagttgaaatcatcggtttaactgaagaatcttctaaaacaactgtaactggtgttgaaatgttccgtaaattattagacttcgctgaagctggagataacatcggtgcattattacgtggtgttgctcgtgaagacgttaaccgtggtcaagtattagctaaaccaggttcaatcacacctcacactaaattcaaagctgaagtttatgtattatctaaagacgaaggtggacgtcatactccattcttcacaaactaccgcccacaattctatttccgtactactgacgtaactggtgtagttaacttaccagaaggtactgaaatggttatgcctggcgacaacgttgaaatggacgttgaattaatttcaccaatcgctattgaagacggtatcgtttctcaatca

SEQ ID NO: 202 - DNA, 831 bp, Staphylococcus warneri
  ref <308>: DATABASE ACCESSION NUMBER: ATCC 27836
cggcggtatcttagttgtatctgcagctgatggtccaatgccacaaactcgtgaacacattcttttatcacgtaacgttggtgtaccagctttagttgtattcttaaacaaagttgatatggtagacgacgaagaattattagaattagtagaaatggaagttcgtgacttattatctgaatatgacttcccaggtgacgacgtacctgtaatcgctggttcagcattaaaagctttagaaggcgacgaaaaatacgaagaaaaaatcttagaattaatgcaagcagttgatgactacattccaactccagaacgtgattctgacaaaccattcatgatgccagttgaggacgtattctcaatcactggtcgtggtactgttgctacaggccgtgttgaacgtggtcaaatcaaagttggtgaagaagttgaaatcatcggtttacatgacacttctaaaacaactgttactggtgtagaaatgttccgtaagttattagactacgctgaagctggtgacaacatcggtgctttattacgtggtgttgctcgtgaagacgtacaacgtggtcaagtattagctgctcctggttcaattacaccacatacaaaattcaaagcggaagtttacgttttatctaaagacgaaggtggacgtcacactccattcttcagtaactaccgcccacaattctatttccgtactactgacgtaactggcgttgttcaattaccagaaggtactgaaatggttatgcctggtgataacgttgaaatgacagtagaattaatcgctcctatcgcgattgaagacggtactcgtttctcaac

SEQ ID NO: 203 - DNA, 829 bp, Staphylococcus warneri
  Strain CSG 50
cggcggtatcttagttgtatctgcagctgatggtccaatgccacaaactcgtgaacacattcttttatcacgtaacgttggtgtaccagctttagttgtattcttaaacaaagttgatatggtagacgacgaagaattattagaattagtagaaatggaagttcgtgacttattatctgaatatgacttcccaggtgacgacgtacctgtaatcgctggttcagcattaaaagctttagaaggcgacgaaaaatacgaagaaaaaatcttagaattaatgcaagcagttgatgactacattccaactccagaacgtgattctgacaaaccattcatgatgccagttgaggacgtattctcaatcactggtcgtggtactgttgctacaggccgtgttgaacgtggtcaaatcaaagttggtgaagaagttgaaatcatcggtttacatgacacttctaaaacaactgttactggtgtagaaatgttccgtaagttattagactacgctgaagctggtgacaacatcggtgctttattacgtggtgttgctcgtgaagacgtacaacgtggtcaagtattagctgctcctggttcaattacaccacatacaaaattcaaagcggaagtttacgttttatctaaagacgaaggtggacgtcacactccattcttcagtaactaccgcccacaattctatttccgtactactgacgtaactggcgttgttcaattaccagaaggtactgaaatggttatgcctggtgataacgttgaaatgacagtagaattaatcgctcctatcgcgattgaagacggtactcgtttctca

SEQ ID NO: 204 - DNA, 839 bp, Bifidobacterium longum
  ref <308>: DATABASE ACCESSION NUMBER: ATCC 15707
tggcgctatcctcgttgtggccgccaccgacggcccgatggcccagactcgcgagcacgtgctgctcgcccgtcaggttggcgttccgaagatcctcgtcgccctgaacaagtgcgacatggtcgacgatgaagagctcatcgagctcgtcgaagaagaggtccgcgacctcctcgacgagaacggcttcgaccgtgactgcccggtcatccacacctccgcttacggtgctctgcacgacgacgctccggaccacgagaagtgggtccagtccgttaaggacctcatggacgctgtcgacgactacatcccgaccccggttcacgacctggacaagccgttcctgatgccgatcgaggacgtcttcaccatctccggccgtggtaccgttgtcaccggtcgtgtcgagcgtggccagctggccgtcaacaccccggtcgagatcgttggtatccgtccgacccagcagaccaccgtcacctccatcgagaccttccacaagaccatggacgcctgcgaggctggcgacaacaccggtctgcttctgcgtggtctcggccgtgacgatgtcgagcgtggccaggttgtggccaagccgggctccgtcaccccgcacaccaagttcgagggcgaagtctacgtgctgaccaaggacgaaggcggccgtcactcgccgttcttctccaactaccgtccgcagttctacttccgcaccaccgacgtcaccggcgtcatcgagctgccggaaggcgtcgagatggttcagccgggcgaccacgctaccttcaccgttgagctgattcagcccatcgctatggaggaaggcctgaccttcgctg

SEQ ID NO: 205 - DNA, 754 bp, Stenotrophomonas maltophilia
  strain CDC F3338
cggcgcgatcctggtgtgctcggccgctgacggcccgatgccgcagacccgtgagcacatcctgctgtcgcgccaggtcggcgtgccgtacatcgtcgtgttcctgaacaaggccgacatggtcgacgacgccgagctgctcgagctggtcgagatggaagtgcgcgaactgctgagcaagtacgagttcccgggcgacgacaccccgatcatcgccggttcggcccgcctggcgctggaaggcgaccagagcgacatcggcgtgccggccatcctgaagctggtcgacgcgctggacagctggattccggagccggagcgtgcgatcgacaagccgttcctgatgccggtggaagacgtgttctcgatctcgggccgcggcaccgtggtgaccggtcgtatcgagcgcggcgtgatcaaggttggcgacgaaatcgaaatcgtcggcatccgtccggtgcagaagaccaccgtgaccggcgttgaaatgttccgcaagctgctggaccagggtcaggcaggcgacaacgctggcctgctgctgcgcggcaccaagcgtgatgacgtcgagcgtggccaggtgctggccaagccgggcacgatcaagccgcacaccaagttcgaaggcgaagtgtacgtcctgtcgaaggacgagggcggccgccacaccccgttcttcaacggctaccgtccgcagttctacttccgcaccaccgacatcaccggcgccgctgcactgccggaaggcgtcgaa

SEQ ID NO: 206 - DNA, 835 bp, Streptococcus acidominimus
  ref <308>: DATABASE ACCESSION NUMBER: ATCC 51726
tggtgctatccttgtagtagcttcaactgacggaccaatgccacaaactcgtgagcacatccttctttcacgtcaagttggtgttaaaaaccttatcgttttcatgaacaaagttgaccttgttgatgatgaagaattgcttgaattggttgaaatggaaatccgtgaccttctttcagaatacgatttcccaggtgatgatcttccagttgttcaaggttcagctcttaaagcgcttgaaggtgattcagcacaagaagatgttatcatggaattgatgtcaatcgttgacacatacattccagaaccagaacgtgatactgacaaaccattgcttcttccagtcgaggatgtattctcaatcactggacgtggtactgttgcttcaggacgtatcgaccgtggtactgttaaagttaatgacgaagttgaaatcgttggtatcaaagacgaaatctctaaagcagttgttactggtgttgaaatgttccgtaaacaacttgacgaaggtcttgctggagataacgttggtgttcttcttcgtggtgtacaacgtgatgaaatcgaacgtggtcaagttcttgctaaaccaggttcaatcaacccacacactaaattcaaaggtgaagtttacgttctttctaaagaagaaggtggacgtcacactccattcttcgataactaccgtcctcagttctacttccgtacaactgacgtaactggttcaatcaaattgccagaaggtactgaaatggtaatgcctggtgataacgtaactatcgaagttgagttgatccacccaatcgccgttgaacaaggtactactttctctatc

SEQ ID NO: 207 - DNA, 819 bp, Streptococcus agalactiae
  ref <308>: DATABASE ACCESSION NUMBER: ATCC 12403
ctatccttgtagttgcttcaactgatggaccaatgccacaaactcgtgagcacatccttctttcacgtcaagttggtgttaaacaccttatcgtattcatgaacaaagttgaccttgttgatgatgaagaattgcttgaattggttgaaatggaaattcgtgaccttctttcagaatacgacttcccaggtgatgaccttccagttatccaaggttcagctcttaaagcacttgaaggcgacgaaaaatacgaagacatcatcatggaattgatgagcactgttgatgagtacattccagaaccagaacgtgatactgacaaacctttacttcttccagttgaagatgtattctcaatcactggacgtggtacagttgcttcaggacgtatcgaccgtggtactgttcgtgtcaacgacgaagttgaaatcgttggtattaaagaagatatccaaaaagcagttgttactggtgttgaaatgttccgtaaacaacttgacgaaggtcttgcaggggacaacgttggtgttcttcttcgtggtgttcaacgtgatgaaatcgaacgtggtcaagttcttgctaaaccaggttcaatcaacccacacactaaatttaaaggtgaagtttacatcctttctaaagaagaaggtggacgtcatactccattcttcaacaactaccgtccacaattctacttccgtacaactgacgtaacaggttcaatcgaacttccagcaggaacagaaatggttatgcctggtgataacgttactatcgaagttgaattgattcacccaatcgccgtagaacaaggtacta

SEQ ID NO: 208 - DNA, 819 bp, Streptococcus agalactiae
  ref <308>: DATABASE ACCESSION NUMBER: ATCC 12973
ctatccttgtagttgcttcaactgatggaccaatgccacaaactcgtgagcacatccttctttcacgtcaagttggtgttaaacaccttatcgtattcatgaacaaagttgaccttgttgatgatgaagaattgcttgaattggttgaaatggaaattcgtgaccttctttcagaatacgacttcccaggtgatgaccttccagttatccaaggttcagctcttaaagcacttgaaggcgatgaaaaatacgaagacatcatcatggaattgatgagcactgttgatgagtacattccagaaccagaacgtgatactgacaaacctttacttcttccagtcgaagatgtattctcaatcactggacgtggtacagttgcttcaggacgtatcgaccgtggtactgttcgtgtcaacgacgaagttgaaatcgttggtattaaagaagatatccaaaaagcagttgttactggtgttgaaatgttccgtaaacaacttgacgaaggtcttgcaggggacaacgttggtgttcttcttcgtggtgttcaacgtgatgaaatcgaacgtggtcaagttcttgctaaaccaggttcaatcaacccacacactaaatttaaaggtgaagtttacatcctttctaaagaagaaggtggacgtcatactccattcttcaacaactaccgtccacaattctacttccgtacaactgacgtaacaggttcaatcgaacttccagcaggaacagaaatggttatgcctggtgataacgttactatcgaagttgaattgattcacccaatcgccgtagaacaaggtacta

SEQ ID NO: 209 - DNA, 822 bp, Streptococcus agalactiae
  ref <308>: DATABASE ACCESSION NUMBER: ATCC 13813
agctatccttgtagttgcttcaactgatggaccaatgccacaaactcgtgagcacatccttctttcacgtcaagttggtgttaaacaccttatcgtattcatgaacaaagttgaccttgttgatgatgaagaattgcttgaattggttgaaatggaaattcgtgaccttctttcagaatacgacttcccaggtgatgaccttccagttatccaaggttcagctcttaaagcacttgaaggcgatgaaaaatacgaagacatcatcatggaattgatgagcactgttgatgagtacattccagaaccagaacgtgatactgacaaacctttacttcttccagtcgaagatgtattctcaatcactggacgtggtacagttgcttcaggacgtatcgaccgtggtactgttcgtgtcaacgacgaagttgaaatcgttggtattaaagaagatatccaaaaagcagttgttactggtgttgaaatgttccgtaaacaacttgacgaaggtcttgcaggggacaacgttggtgttcttcttcgtggtgttcaacgtgatgaaatcgaacgtggtcaagttcttgctaaaccaggttcaatcaacccacacactaaatttaaaggtgaagtttacatcctttctaaagaagaaggtggacgtcatactccattcttcaacaactaccgtccacaattctacttccgtacaactgacgtaacaggttcaatcgaacttccagcaggaacagaaatggttatgcctggtgataacgttactatcgaagttgaattgattcacccaatcgccgtagaacaaggtactac

SEQ ID NO: 210 - DNA, 825 bp, Streptococcus agalactiae
  strain CDCss-1073
cggagctatccttgtagttgcttcaactgatggaccaatgccacaaactcgtgagcacatccttctttcacgtcaagttggtgttaaacaccttatcgtattcatgaacaaagttgaccttgttgatgatgaagaattgcttgaattggttgaaatggaaattcgtgaccttctttcagaatacgacttcccaggtgatgaccttccagttatccaaggttcagctcttaaagcacttgaaggcgacgaaaaatacgaagacatcatcatggaattgatgagcactgttgatgagtacattccagaaccagaacgtgatactgacaaacctttacttcttccagttgaagatgtattctcaatcactggacgtggtacagttgcttcaggacgtatcgaccgtggtactgttcgtgtcaacgacgaagttgaaatcgttggtattaaagaagatatccaaaaagcagttgttactggtgttgaaatgttccgtaaacaacttgacgaaggtcttgcaggggacaacgttggtgttcttcttcgtggtgttcaacgtgatgaaatcgaacgtggtcaagttcttgctaaaccaggttcaatcaacccacacactaaatttaaaggtgaagtttacatcctttctaaagaagaaggtggacgtcatactccattcttcaacaactaccgtccacaattctacttccgtacaactgacgtaacaggttcaatcgaacttccagcaggaacagaaatggttatgcctggtgataacgttactatcgaagttgaattgattcacccaatcgccgtagaacaaggtactac

SEQ ID NO: 211 - DNA, 826 bp, Streptococcus anginosus
  ref <308>: DATABASE ACCESSION NUMBER: ATCC 33397
ggagctatccttgtagtagcttcaactgacggaccaatgcctcaaactcgtgaacacatccttctttcacgccaagtaggtgttaaataccttatcgtcttcatgaataaagttgacttggttgacgatgaagaattgcttgaattggttgaaatggaaatccgtgaccttctttcagaatacgatttcccaggtgatgaaatcccagttatccaaggttcagctcttaaagctcttgaaggtgatgaaaaatatgaagacatcatcatggaattgatggatactgttgatgaatacattccagaaccagaacgtgacactgacaaaccattgcttcttccagttgaagatgtattctcaattactggacgtggtactgttgcttcaggacgtatcgaccgtggtactgttaaagtcaacgacgaagttgaaatcgttggtatccgtgatgaaatccaaaaagcagttgttactggtgttgaaatgttccgtaaacaattggacgaaggtcttgctggagataacgtaggggttcttcttcgtggtatccaacgtgacgaaatcgaacgtggacaagttcttgctaaaccaggttcaattcatccacacactaaattcaaaggtgaagtttacatccttactaaagaagaaggtggacgtcatactccattcttcaacaactaccgtcctcaattctacttccgtactacagacgttacaggttcaatcgaacttcctgcaggtactgaaatggtaatgcctggtgataacgtaacaatcgacgttgaattgatccacccaattgccgtagaacaaggaactacat

SEQ ID NO: 212 - DNA, 827 bp, Streptococcus bovis
  ref <308>: DATABASE ACCESSION NUMBER: ATCC 33317
tggtgctatccttgtagtagcttctacagatggtccaatgccacaaacacgtgaacacatccttctttcacgtcaagttggtgttaaacaccttatcgtcttcatgaacaaagttgaccttgttgatgacgaagaattgcttgaattggttgaaatggaaatccgtgaccttctttcagaatatgatttcccaggtgatgaaatccctgtaatccaaggttcagctcttaaagcccttgaaggtgacactcactacgaagacatcatcatggaattgatgaacactgtagatgaatacattccagaaccaaaacgtgatactgacaaaccattgcttcttccagtcgaagacgtattctcaatcactggtcgtggtactgtagcatcaggacgtatcgaccgtggtactgttaaagtcaacgacgaagttgaaatcgttggtatccgtgacgacatccaaaaagctgttgttactggtgttgaaatgttccgtaaacaacttgatgaaggtatcgcaggggataacgttggtgttcttcttcgtggtatccaacgtgatgaaatcgaacgtggtcaagttcttgctaaaccaggttcaatccacccacacactaaattcaaaggtgaagtttacatccttactaaagaagaaggtggacgtcacactccattcttcaacaactaccgtcctcaattctacttccgtacaactgacgttacaggttcaatcgaacttccagcaggtactgaaatggtaatgcctggtgataacgttactatcgacgttgaattgattcacccaatcgccgttgaacaaggtactacat

SEQ ID NO: 213 - DNA, 821 bp, Streptococcus anginosus
  ref <308>: DATABASE ACCESSION NUMBER: ATCC 27823
gctatcctcgtagtagcttcaactgatggaccaatgcctcaaactcgtgaacatatccttctttcacgtcaagtaggtgttaaataccttatcgtcttcatgaacaaagttgacttggttgacgatgaagaattgcttgaattggttgaaatggaaatccgtgaccttctttcagaatacgatttcccaggtgatgaaatcccagttatccaaggttcagctcttaaagctcttgaaggtgatgaaaaatatgaagacatcatcatggaattgatggatactgttgatgaatacattccagaaccagaacgtgacactgacaaaccacttcttcttccagtcgaagatgtattctcaatcactggacgtggtactgttgcttcaggacgtatcgaccgtggtactgttaaagtcaatgatgaagttgaaattgttggtattcgtgacgaaatccaaaaagcagttgttactggtgttgaaatgttccgtaaacaattggacgaaggtcttgctggagataacgtaggggttcttcttcgtggtatccaacgtgacgaaatcgaacgtggacaagttcttgctaaaccaggttcaattcatccacacactaaattcaaaggtgaagtttacatccttactaaagaagaaggtggacgtcatactccattcttcaacaactaccgtcctcaattctacttccgtactacagacgttacaggttcaatcgaacttcctgcaggtactgaaatggtaatgcctggtgataacgtaacaattgatgttgagttgatccacccaattgccgtagaacaaggaactac

SEQ ID NO: 214 - DNA, 821 bp, Streptococcus cricetus
  ref <308>: DATABASE ACCESSION NUMBER: ATCC 19642
gctatccttgtagtagcttctacagacggaccaatgccacaaactcgtgaacacatcttgctttcacgccaagttggtgttaagagccttatcgtcttcatgaacaaggttgacttggttgacgatgaagaattgcttgaattggttgaaatggaaatccgtgatcttctttcagaatacgatttcccaggtgatgatatccctgttgttcaaggttcagctcttaaagcccttgaaggtgatacagctgccgaagacaagatcatggaattgatggacatcgttgatgactacattccagaaccaaaacgtgatactgataagccattgcttcttccagtcgaagacgtattctcaatcactggacgtggtactgttgcttcaggacgtatcgaccgtggtactgttaaggtcaatgacgaagttgaaatcgttggtatcaaggacgaaatccaaaaagcggttgttaccggagttgaaatgttccgtaaacaattggatgaaggtcttgcaggggataacgttggtgtgcttcttcgtggtatccaacgtgatgaaatcgaacgtggtcaagtattggctgcacctggttcaatccatccacacactaaattcaagggtgaagtttacatcctttctaaagatgaaggtggacgtcacactccattcttcaacaactaccgtccacagttctacttccgtacaactgacgtaactggttcaatcgaattgccagcaggtactgaaatggttatgcctggtgataacgttactatcgacgttgaattgatccacccaatcgctgttgaaaaaggtactac

SEQ ID NO: 215 - DNA, 821 bp, Streptococcus cristatus
  ref <308>: DATABASE ACCESSION NUMBER: ATCC 51100
tatccttgtagtagcttcaactgacggaccaatgccacaaactcgtgagcacatccttctttcacgtcaggttggtgttaaacaccttatcgtcttcatgaacaagatcgacttggttgatgacgaagaattgcttgaattggttgaaatggaaatccgtgacctcttgtcagaatacgacttcccaggtgacgatcttccagttatccaaggttcagctcttaaagctcttgaaggtgatactaagtacgaagacatcatcatggaattgatgaacactgttgatgagtacatcccagaaccagaacgtgatactgacaaacctcttcttcttccagtcgaagacgtattctcaatcactggtcgtggtacagttgcttcaggacgtatcgaccgtggtactgttcgtgtcaacgatgaaatcgaaatcgttggtatcaaagaagaaatccaaaaagcagttgttactggtgttgaaatgttccgtaaacagcttgacgaaggtcttgcaggggacaacgtaggtgtacttcttcgtggtatccaacgtgatgaaatcgaacgtggtcaagttatcgctaaaccaggttcaatcaacccacacactaaattcaagggtgaagtttacatccttactaaagaagaaggtggacgtcacactccattcttcaacaactaccgtccacagttctacttccgtacaactgacgttacaggttcaatcgaacttccagcaggtactgaaatggtaatgcctggtgataacgtaactatcgacgttgagttgatccacccaatcgccgttgaacaaggtactcctt

SEQ ID NO: 216 - DNA, 792 bp, Streptococcus downei
  ref <308>: DATABASE ACCESSION NUMBER: ATCC 33748
agtagcttctactgatggaccaatgccacaaactcgtgaacacatcttgctttcacgtcaggttggtgttaagaaccttatcgtcttcatgaacaaggttgacttggttgacgatgaagaattgcttgaattggttgaaatggaaatccgtgacctgctttcagaatacgatttcccaggtgatgatatccctgttgttcaaggttcagctcttaaggctcttgaaggtgatacagctgccgaagacaagatcatggaattgatggacatcgttgatgactacattccagaaccaaaacgtgatactgataagcctttgcttcttccagtcgaagatgtattctcaatcactggacgtggtactgtagcttcaggacgtatcgaccgtggtactgttaaggtcaacgacgaagttgaaatcgttggtatcaaggacgaaatccaaaaagcagttgttaccggagttgaaatgttccgtaaacaattggacgaaggtcttgcaggggataacgttggtgtgcttcttcgtggtatccaacgtgatgaaatcgaacgtggtcaagtgttggctgcgcctggttcgattcacccacacactaagtttaaaggtgaagtttacatcctttctaaagaagaaggtggacgtcatactccattctttaacaactaccgtccacagttctacttccgtacaactgacgtaactggttcaatcgaattgccagcgggtactgaaatggttatgcctggtgataacgttactatcgacgttgaattgatccacccaattgc

SEQ ID NO: 217 - DNA, 795 bp, Streptococcus dysgalactiae
  ref <308>: DATABASE ACCESSION NUMBER: ATCC 43078
gtagttgcttcaacagacggaccaatgccacaaactcgtgagcacatcctcctttcacgtcaggttggtgttaaacaccttatcgtgttcatgaacaaaattgaccttgttgacgatgaagaattgcttgaattggttgaaatggaaatccgtgaccttctttcagaatacgatttcccaggtgatgaccttccagttatccaaggttcagctcttaaagctcttgaaggcgacactaaatttgaagacatcatcatggaattgatggatactgttgattcatacattccagaaccagaacgtgacactgacaaaccattgcttcttccagtcgaagacgtattctcaatcacaggtcgtggtacagttgcttcaggacgtatcgaccgtggtactgttcgtgtcaacgacgaaatcgaaatcgttggtatcaaagaagaaactaaaaaagctgttgttactggtgttgaaatgttccgtaaacaacttgacgaaggtcttgcaggagacaacgtaggtatccttcttcgtggtgttcaacgtgacgaaatcgaacgtggtcaagttattgctaaaccaggttcaatcaacccacacactaaattcaaaggtgaagtatatatcctttctaaagacgaaggtggacgtcacactccattcttcaacaactatcgtccacaattctacttccgtacaactgacgtaacaggttcaatcgaacttccagctggtacagaaatggttatgcctggtgataacgtgacaatcaacgttgagttgatccacccaatcgcc

SEQ ID NO: 218 - DNA, 828 bp, Streptococcus equi subsp. equi
  ref <308>: DATABASE ACCESSION NUMBER: ATCC 9528
cggagctatccttgtagttgcttcaactgacggaccaatgccacaaactcgtgagcacatccttctttcacgtcaggttggtgttaagcaccttatcgtgttcatgaacaaggttgaccttgttgacgatgaagaattgcttgagcttgttgaaatggaaattcgtgaccttctttcagaatatgatttcccaggtgatgaccttccagttatccaaggttcagcgcttaaggctcttgaaggcgacagcaaatacgaagatatcatcatggaattgatggatactgttgattcatacattccagaaccagaacgtgacacagacaagccattgcttcttccagtcgaggacgtattctcaatcactggacgtggtactgttgcttcaggacgtatcgaccgcggtactgttcgtgttaacgacgaaatcgaaatcgttggtatcagagacgagatcaaaaaagcagttgttactggtgtcgaaatgttccgtaaacagcttgacgaaggtcttgcaggggacaacgttggtgttcttcttcgtggtgtacaacgtgatgaaatcgaacgtggtcaagttattgctaagccaggttctatcaacccacacactaaatttaaaggtgaagtatatatccttactaaagaagaaggtggacgtcacacaccattcttcaacaactatcgtccacaattctacttccgtactactgacgtaacaggttcaatcgagcttccagcaggtacagaaatggttatgcctggtgataacgtgactattgacgttgagttgatccacccaatcgccgtagaacaaggtactacatt

SEQ ID NO: 219 - DNA, 825 bp, Streptococcus ferus
  ref <308>: DATABASE ACCESSION NUMBER: ATCC 33477
cggtgcaatccttgtagtagcttctacagatggaccaatgccacaaactcgtgagcacatccttctttcacgtcaggtaggtgttaaacaccttatcgtcttcatgaacaaagttgacttggttgacgatgaagaattgcttgaattggttgaaatggaaatccgtgacctgctttcagaatatgatttcccaggtgatgaccttccagttatccaaggttcagctcttaaagcgcttgaaggtgatactgctcaagaagatgttatcatggaattgatgaaaaccgttgatgagtacatcccagaaccagaacgtgatactgacaaaccattgcttcttccagtcgaagatgtattctcaatcacaggtcgtggtactgtagcttcaggacgtatcgatcgtggtactgtaagagtcaacgatgaagttgaaatcgttggtatcaaagacgaaatcactaaagcagttgttaccggtgttgaaatgttccgtaaacaattggacgaaggtcttgctggtgataacgttggtgtgcttctccgtggtgtgcaacgtgatgaaatcgaacgtggtcaagtattggctaaaccaggttcaatcaacccacacactaaatttaaaggtgaagtttacatccttactaaagaagaaggtggacgtcatacaccattcttcaacaactaccgtccacagttctacttccgtacaactgacgtaactggttcaatcgaattgccagcaggtactgaaatggttatgcctggtgataacgtgactatcgacgttgaattgatccacccaatcgccgttgaacaaggtactac

SEQ ID NO: 220 - DNA, 826 bp, Streptococcus gordonii
  ref <308>: DATABASE ACCESSION NUMBER: ATCC 10558
cggagctatccttgtagtagcttcaactgatggtcctatgccacaaactcgtgagcacatccttctctcacgccaagttggtgttaaacacttgatcgtgttcatgaacaaagttgacttggttgacgatgaagaattgcttgagttggttgaaatggaaatccgtgacctcttgtcagaatacgacttcccaggtgacgatcttccagttatccaaggttcagctcttaaagctcttgaaggtgactctaaatatgaagatatcatcatggaattgatgaacactgttgatgagtacatcccagaaccagaacgcgacactgacaaaccattgcttcttccagtcgaagacgtattctcaatcactggacgtggtacagttgcttcaggacgtatcgaccgtggtatcgttaaagtcaatgacgaaatcgaaatcgttggtatcaaagaagaaatccaaaaagcagttgttactggtgttgaaatgttccgtaaacagcttgacgaaggtcttgcaggggacaacgttggtgtgcttcttcgtggtatccaacgtgatgaaatcgaacgtggacaagttattgctaaaccaggttcaatcaacccacacactaaattcaaaggtgaagtttatatccttactaaagaagaaggtggacgtcacactccattcttcaacaactaccgtccacagttctacttccgtacaactgacgttacaggttcaatcgaacttccagcaggtactgaaatggtaatgcctggtgataacgtaactatcgacgttgagttgatccacccaatcgccgttgaacaaggtactact

SEQ ID NO: 221 - DNA, 799 bp, Streptococcus anginosus
  ref <308>: DATABASE ACCESSION NUMBER: ATCC 27335
tgtagtagcttcaactgacggaccaatgcctcaaactcgtgaacatatccttctttcacgtcaagtaggtgttaaataccttattgtcttcatgaacaaagttgacttggttgacgatgaagaattgcttgaattggttgaaatggaaatccgtgatcttctttcagaatacgatttcccaggtgatgatattccagtaatccaaggttcagcacttaaagctcttgaaggtgatgaaaaatatgaagacatcatcatggaattgatgaatactgttgatgaatatattccagaaccagaacgtgatactgacaaaccattgcttcttccagtcgaagatgtattctcaatcactggacgtggtactgttgcttcaggacgtatcgaccgtggtactgttaaagtcaacgatgaagttgaaatcgttggtatccgcgaggaaatccaaaaagcagttgttactggtgttgaaatgttccgtaaacaattggacgaaggtcttgctggagataacgtaggggttcttcttcgtggtatccaacgtgacgaaattgaacgtggacaagttcttgctaaaccaggttcaattcatccacacactaaattcaaaggtgaagtttacatccttactaaagaagaaggtggacgtcatactccattcttcaacaactaccgtcctcaattctacttccgtactacagacgttacaggttcaatcgaacttcctgcaggtactgaaatggtaatgcctggtgataacgtaacaattgatgttgagttgatccacccaattgccgta

SEQ ID NO: 222 - DNA, 825 bp, Streptococcus macacae
  ref <308>: DATABASE ACCESSION NUMBER: ATCC 35911
tggtgctattcttgtagtagcttcaactgacggtccaatgcctcaaacgcgtgaacatatccttctttcacgccaagtaggtgttaaaaaccttattgttttcatgaataaagttgacttagttgatgatgaagaattgcttgaattggttgaaatggaaatccgtgatcttcttacagaatatgatttcccaggcgatgaacttccagttatccaaggttcagcacttaaagctcttgaaggtgatactaagtacgaagatattatcatggaattgttggatactgtagatgattacatcccagaaccacaacgtgatactgacaagccattgcttcttccagtcgaagatgttttctctattactggacgtggtactgttgcttcaggacgtattgaccgtggtactgttaaggttaatgatgaagttgaaatcgttggtattcgtgacgatattcaaaaagcagttgttactggtgttgaaatgttccgtaaacagcttgacgaaggtcttgctggtgataacgtcggtgtccttcttcgtggtatccaacgtgatgaaattgaacgcggtcaagttcttgctaaaccaggatcaattcatccacatactaaattcaaaggtgaagtttatattcttactaaagaagaaggtggacgtcatactccattctttaacaactaccgtccacagttctacttccgtacaactgatgtaactggttcaattgatttgccagcaggtactgaaatggttatgcctggtgataatgttacgattgatgttgaactgatccacccaatcgctgttgaacaaggtacaac

SEQ ID NO: 223 - DNA, 822 bp, Streptococcus gordonii
  ref <308>: DATABASE ACCESSION NUMBER: ATCC 33399
ctatccttgtagtagcttcaactgacggaccaatgccacaaactcgtgagcacatccttctttcacgtcaggttggtgttaaacaccttatcgtcttcatgaacaaagttgacttggttgacgacgaagaattgcttgaattggttgaaatggaaatccgtgacctattgtcagaatacgacttcccaggtgacgatcttccagttatccaaggttcagctcttaaagcccttgaaggtgacactaaatacgaagacatcgttatggaattgatgaacacagttgatgagtacatcccagaaccagaacgtgacactgacaaaccattgcttcttccagtcgaagacgtattctcaatcactggtcgtggtacagttgcttcaggacgtatcgaccgtggtatcgttaaagtcaacgacgaaatcgaaatcgttggtatcaaagaagaaactcaaaaagcagttgttactggtgttgaaatgttccgtaaacaacttgacgaaggtcttgccggagataatgtaggtgtccttcttcgtggtgttcaacgtgatgaaatcgaacgtggacaagttattgctaaaccaggttcaatcaacccacacactaaattcaaaggtgaagtttacatccttactaaagaagaaggtggacgtcacactccattcttcaacaactaccgtccacaattctacttccgtactactgacgttacaggttcaatcgaacttccagcaggtactgaaatggtaatgcctggtgataacgtgacaatcgacgttgagttgatccacccaatcgccgtagaacaaggtactacat

SEQ ID NO: 224 - DNA, 827 bp, Streptococcus mutans
  ref <308>: DATABASE ACCESSION NUMBER: ATCC 25175
ccctggtgctatccttgtagtagcttcaactgatggaccaatgccacaaactcgtgaacacattcttctttcacgtcaagttggtgttaaatacctcattgtcttcatgaataaagttgatttggttgacgatgaagaattgcttgaattggttgaaatggaaatccgtgatcttctttcagaatatgatttcccaggtgatgatattccagttattcaaggttcagctcttaaagctcttgaaggcgatactgctcaagaagatatcatcatggaattaatgcatactgttgatgactacattccagatccagaacgtgatactgacaagccgctccttcttccagtcgaagatgttttctcaatcactggtcgtggtactgttgcttcaggacgtattgatcgtggtactgttaaagttaacgatgaagttgaaatcgttggtatccgtgatgacattcaaaaagctgttgttactggtgttgaaatgttccgtaaacaattggatgaaggtattgcaggggataatgttggtgttctccttcgtggtatccaacgtgatgaaatcgaacgtggtcaagttcttgctaaaccaggttcaattcacccacatactaaattcaaaggtgaagtttatatccttactaaagaggaaggtggacgtcatacaccattcttcaataactatcgtccacaattctacttccgtacaactgacgtaactggttcaattgagttgccagcaggtactgaaatggttatgcctggtgataacgttactattgacgttgaattgatccatccaatcgctgttgaacaaggtacta

SEQ ID NO: 225 - DNA, 824 bp, Streptococcus parasanguinis
  ref <308>: DATABASE ACCESSION NUMBER: ATCC 15912
agctatccttgtagtagcttcaactgacggaccaatgccacaaacacgtgaacacatccttctttcacgtcaggttggtgttaaacacttgatcgtcttcatgaacaaagttgacttggttgatgatgaagaattgcttgaattggttgaaatggaaatccgtgaccttctttcagaatacgatttcccaggtgatgaccttccagttatccaaggttcagctcttaaagctcttgaaggtgactctaaatatgaagatatcatcatggaattgatggatactgttgatgagtacatcccagaaccagaacgcgatactgacaaaccattgcttcttccagtcgaagacgtattctcaatcactggacgtggtacagttgcttcaggacgtatcgaccgtggtgttgttcgtgtcaatgatgaaatcgaaatcgttggtatcaaagaagaaatccaaaaagcagttgttactggtgttgaaatgttccgtaaacaacttgacgaaggtcttgcaggggataacgttggtgtgcttcttcgtggtatccaacgtgatgaaatcgaacgtggacaagttatcgctaaaccaggttcaatcaacccacacactaaattcaaaggtgaagtttacatccttactaaagaagaaggtggacgtcatactccattcttcaacaactaccgtccacagttctacttccgtacaactgacgtaactggatctatcgaacttccaccaggaactgaaatggtaatgcctggtgataacgtgactatcgacgttgagttgatccacccaatcgccgttgaacaaggtactacat

SEQ ID NO: 226 - DNA, 824 bp, Streptococcus ratti
  ref <308>: DATABASE ACCESSION NUMBER: ATCC 19645
tggtgctatccttgtagtagcttcaactgatggaccaatgccgcaaactcgtgaacacatcttgctttcacgtcaagttggtgttaaataccttatcgtcttcatgaacaaggttgacttggttgatgatgaagaattgcttgaattggttgaaatggaaatccgtgatcttctttcagaatacgatttcccaggtgatgacattccagttatccaaggttcagcccttaaagctcttgaaggtgacactgaacaagaagatgttatcatggaattgatgaaaacagttgatgagtacatcccagatccagaacgcgatactgataagccattgcttcttccagtcgaagacgtgttctcaatcactggacgtggtactgttgcatcaggacgtatcgaccgtggtactgttaaagtcaatgacgaagttgaaatcgttggtatccgtgatgacatccaaaaagctgttgttactggtgttgaaatgttccgtaaacagcttgacgaaggtcttgctggtgataacgttggtgtacttcttcgtggtatccaacgtgatgaaatcgaacgcggtcaagttcttgctaaaccaggttcaattcatccgcatactaaatttaaaggtgaagtttacatccttactaaagaagaaggcggacgtcacactccattcttcaacaactaccgtccacagttctacttccgtacaactgacgtaactggttcaatcgaattgccagcaggtactgaaatggttatgcctggtgataacgtgactatcgacgttgaattgatccacccaatcgctgttgaacaaggtacta

SEQ ID NO: 227 - DNA, 795 bp, Streptococcus sanguinis
  ref <308>: DATABASE ACCESSION NUMBER: ATCC 10556
tgtagtagcttcaactgacggaccaatgccacaaactcgtgagcacatcttgctttcacgtcaggttggtgttaaacacttgatcgtcttcatgaacaaagttgacttggttgacgatgaagaattgcttgaattggttgaaatggaaatccgtgacctcttgtcagaatacgacttcccaggtgacgatcttccagttatccaaggttcagctcttaaagctcttgaaggtgactctaaatatgaagacatcatcatggaattgatggacactgttgatgagtacatcccagaaccagaacgcgatactgacaagccattgcttcttccagtcgaagacgtattctcaatcactggtcgtggtacagttgcttcaggacgtatcgaccgtggtatcgttaaagtcaacgacgaaatcgaaatcgttggtatcaaagaagaaatccaaaaagcagttgttactggtgttgaaatgttccgtaaacagcttgacgaaggtcttgcaggggacaacgtaggtgtgcttctccgtggtatccaacgtgatgaaatcgaacgtggacaagttatcgctaaaccaggttcaatcaacccacacactaaattcaagggtgaagtttatatccttactaaagaagaaggcggacgtcacactccattcttcaacaactaccgtccacagttctacttccgtacaactgacgttacaggttcaatcgaacttccagcaggtactgaaatggtaatgcctggtgataacgtaacaatcgacgttgagttgatccacccaatcgc

SEQ ID NO: 228 - DNA, 795 bp, Streptococcus sobrinus
  ref <308>: DATABASE ACCESSION NUMBER: ATCC 33478
tgtagtagcttctactgacggaccaatgccacaaactcgtgaacacatcttgctttcacgccaagttggtgttaagaacctcatcgtcttcatgaacaaggttgacttggttgatgatgaagaattgcttgaattggttgaaatggaaatccgtgatcttctttcagaatacgatttcccaggtgacgacattcctgttgttcaaggttcagctcttaaggctcttgaaggtgatacagctgccgaagacaagattatggaattgatggacatcgttgatgattacattccagaaccaaaacgcgatactgataagccattgcttctcccagtcgaagacgtattctcaatcactggtcgtggtactgttgcttcaggacgtattgaccgtggtactgttaaggttaacgacgaagttgaaatcgttggtatccgtgacgatatccaaaaagcagttgttactggagttgaaatgttccgtaagcaattggacgaaggtcttgctggagataacgttggtgtgcttcttcgtggtatccaacgtgatgaaattgaacgtggtcaagtattggctgcacctggttcaatccacccacacactaagttcaagggtgaagtttacatcctttctaaagatgaaggtggacgtcacactccattcttcaacaactaccgtccacagttctacttccgtacaactgacgtaactggttcaatcgaattgccagcaggtactgaaatggttatgcctggtgataacgttactatcgacgttgaattgatccacccaatcgc

SEQ ID NO: 229 - DNA, 797 bp, Streptococcus suis
  ref <308>: DATABASE ACCESSION NUMBER: ATCC 43765
tgtagtagcttcaactgacggtccaatgccacaaactcgtgagcacatccttctttcacgtcaggttggtgttaaacaccttatcgtcttcatgaacaaagttgacttggttgacgatgaagaattgcttgagttggttgaaatggaaatccgtgaccttctttcagaatacgatttcccaggtgatgatcttccagttatccaaggttcagctcttaaagctcttgaaggtgactctaagtacgaagacatcgttatggaattgatgaacactgttgatgagtacattccagaaccagaacgcgacactgacaaaccattgttgcttccagtcgaggacgtattctcaatcactggtcgtggtactgtagcttcaggacgtatcgaccgtggtactgttcgtgtcaacgacgaaatcgaaatcgttggtcttcaagaagaaaaatctaaagcagttgttactggtgttgaaatgttccgtaaacaacttgacgaaggtcttgccggcgataacgttggtgtgcttcttcgtggtgtacaacgtgatgaaatcgaacgtggtcaagttatctctaaaccaggttctatcaacccacacactaaattcaaaggtgaagtttacatccttactaaagaagaaggtggacgtcacactccattcttcgacaactaccgtccacagttctacttccgtacaactgacgtaactggttcaatcaaattgccagaaggtactgaaatggtaatgcctggtgataacgttactatcgacgttgaattgatccacccaatcgccg

SEQ ID NO: 230 - DNA, 793 bp, Streptococcus uberis
  ref <308>: DATABASE ACCESSION NUMBER: ATCC 19436
ttgttgttgcatcaactgatggaccaatgccacaaactcgtgagcacatccttctttcacgccaagttggtgttaaacaccttatcgttttcatgaacaaaatcgaccttgttgacgatgaagaattgcttgaattagttgaaatggaaatccgtgaccttctttcagaatacgatttcccaggtgatgacctaccagttatccaaggttcagctcttaaagctcttgaaggtgattctaaatacgaagacatcatcatggaattgatgaaaactgttgatgagtatattccagaaccagaacgtgatacagacaaaccattacttcttccagtcgaagacgtattctcaatcacaggtcgtggtactgtagcttcaggacgtatcgatcgtggtactgttcgtgtcaacgacgaaattgaaatcgttggtatcaaagaagaaactaaaaaagcagttgttactggtgttgaaatgttccgtaaacaacttgacgaaggtcttgcaggagataacgtaggtatccttcttcgtggtgttcaacgtgacgaaatcgaacgtggacaagttattgctaaaccaggttcaatcaacccacacactaaattcaaaggtgaagtttacatcctttctaaagatgaaggtggacgtcatactccattcttcaacaactaccgtcctcaattctatttccgtacaactgacgtaacaggttcaatcgaacttccagctggtactgaaatggtaatgcctggtgataacgtgacaatcagcgttgagttgatccacccaat

SEQ ID NO: 231 - DNA, 798 bp, Streptococcus vestibularis
  ref <308>: DATABASE ACCESSION NUMBER: ATCC 49124
ttgtagtagcatctactgacggaccaatgccacaaactcgtgagcacatccttctttcacgtcaggttggtgttaaacaccttatcgtcttcatgaacaaagttgacttggttgacgatgaagaattgcttgaattggttgaaatggaaatccgtgaccttctttcagaatacgatttcccaggtgatgatattccagttatccaaggttcagctcttaaagctcttgaaggtgattctaaatacgaagacatcatcatggacttgatgaacactgttgacgaatacattccagaaccagaacgtgacactgacaaaccattgttgcttccagtcgaagacgtattctcaatcactggtcgtggtactgttgcttcaggacgtatcgaccgtggtgttgttcgtgttaatgacgaagttgaaatcgttggtcttaaagaagaaatccaaaaagcagttgttactggtgtagaaatgttccgtaaacaacttgacgaaggtattgccggagataacgtcggtgtccttcttcgtggtatccaacgtgatgaaattgaacgtggtcaagtattggctgcacctggttcaatcaacccacacactaaattcaaaggtgaagtttacatcctttctaaagaagaaggtggacgtcacactccattcttcaacaactaccgtccacagttctacttccgtacaactgacgtaacaggttcaatcgaacttcctgcaggtactgaaatggttatgcctggtgataacgtgactatcgacgttgagttgatccacccaatcgccg

SEQ ID NO: 232 - DNA, 829 bp, Tatumella ptyseos
  ref <308>: DATABASE ACCESSION NUMBER: ATCC 33301
ggcgctatcctggttgttgctgcaactgacggccctatgcctcagacccgtgagcacatcctgctgggccgccaggtaggcgttccttacatcatcgtgttcctgaacaaatgtgacatggttgatgatgaagagctgctggaactggtagaaatggaagtccgtgacctgctgtcacagtacgacttcccgggtgacgacacgccaatcgttcgcggttcagcgctgaaagcactggaaggtgaaggcgagtgggaagagaagattctggagctggctggcttcctggattcttacatccctgagccagagcgtgctatcgatcagccgttcctgctgccaatcgaagacgtattctcaatctccggtcgtggtacagttgttaccggtcgtgtagagcgcgggatcatcaaagtcggtgaagaagttgagatcgttggtatcaaagatactgcgaaatcaacctgtaccggtgttgaaatgttccgtaaactgctggaccagggtcaggcgggtgagaacgttggtgttctgctgcgtggtatcaagcgtgaagagatcgaacgtggtcaggttctggctaaaccaggttcaatcaaaccacacacccagttcgagtcagaagtttatattctgtctaaagacgaaggcggccgtcatactccgttcttcaaaggctaccgtccacagttctacttccgtacaactgacgtgaccggaaccatcgaactgccggaaggcgtagagatggtaatgcctggtgacaacatcaaaatggttgttaccctgatccatccaatcgcgatggacgatggtctgcgtttcgcaa

SEQ ID NO: 233 - DNA, 829 bp, Trabulsiella guamensis
  ref <308>: DATABASE ACCESSION NUMBER: ATCC 49490
ggcgcaatcctggtagtagcagcgactgacggcccgatgccgcagactcgtgagcacatcctgctgggtcgtcaggtaggcgttccgtacatcatcgtgttcctgaacaaatgcgacatggttgatgacgaagagctgctggaactggtagagatggaagttcgtgaactgctgtctcagtacgatttcccgggcgatgacacgccgatcgtacgtggttctgctctgaaagcgctggaaggcgacgcagagtgggaagcgaaaatcatcgaactggcaggtttcctggattcttacattccggaaccagagcgtgcgattgacaagccgttcctgctgccgatcgaagacgtattctccatctctggtcgtggtaccgttgttaccggtcgtgtagagcgcggtatcatcaaagtgggtgaagaagtagaaatcgttggtatcaaagagactgcgaagtcaacctgtactggcgtagaaatgttccgcaaactgctggacgaaggccgtgctggtgagaacgtaggtgttctgctgcgtggtatcaaacgtgaagaaatcgaacgtggtcaggtactggctaagccgggcaccatcaacccgcacaccaagttcgaatctgaagtgtacattctgtccaaagacgaaggcggccgtcacactccgttcttcaaaggctaccgtccgcagttctacttccgtacaactgacgtgactggcaccatcgaactgccggaaggcgtagagatggtaatgccgggcgacaacatcaaaatggttgttaccctgatccacccgatcgcgatggacgacggtctgcgtttcgcaa

SEQ ID NO: 234 - DNA, 825 bp, Veillonella parvula
  ref <308>: DATABASE ACCESSION NUMBER: ATCC 10790
cggcgctatcttggttgtatccgcagctgacggccctatgcctcaaactcgcgaacacatcttgttggctcgccaagttggtgttcctgcaatcgtagtattcttgaacaaagctgacatggttgacgatgaagaattgatcgaattggtagaaatggaagttcgtgaacttctttcttcctacgaattccctggcgacgaagtacctatcgttgtaggttccgcgttgaaagctttggaaggcgatgctcaatatgtagctaaaattgacgaattgatggacgctgtagactcctacatcccaacaccagttcgtgacactgataaaccattcttgatgcctgtggaagatgttttcacaatcactggtcgtggtacagtagcaactggccgtgttgaacgtggtcaagtaaacgttggtgatactgttgaagtagtaggcttgaaagaaaaagctgaacaatacgtagtaacaggtcttgaaatgttccgtaaagtgttggattctgcagtagcaggtgacaacgtaggtgcattgcttcgtggtgttgatcgtaaagacatygaacgtggtcaagtattggctaaaccaggttccatcaacccacayacaaaattcaaagcagaagtatacgtattgactaaagaagaaggtggtcgtcatactccattcttctccaactaccgtccacaattctacttccgtacaacagacgtaacaggtgttgtaaaccttcctgaaggtgtagaaatgtgtatgcctggcgataacgtaacaatggaaatcgaattgattactccaatcgctatcgaagaaggtcttcg

SEQ ID NO: 235 - DNA, 825 bp, Yersinia enterocolitica
  ref <308>: DATABASE ACCESSION NUMBER: ATCC 9610
cgctatcctggttgttgctgcaactgatggcccaatgccacagactcgtgagcacatcctgttgggtcgtcaggttggtgttccttacatcatcgtattcatgaacaaatgtgacatggttgacgatgaagagctgctagaactggtagaaatggaagtgcgcgatcttctgtctacctacgatttcccaggcgatgatacgccagttgttcgtggttccgcgctgaaagcattggaaggcgaacctgagtgggaagcaaaaattatcgaactggctggctacctggattcttacatcccagaaccagagcgtgctatcgataagccgttcctgctgccaatcgaagacgtattctctatctctggtcgtggtactgttgtaacgggtcgtgtagagcgcggtatcgttaaagttggtgaagaagtcgaaattgttggcctgaaagataccgttaaatctacttgtactggcgttgaaatgttccgcaaactgctggatgaaggccgtgcaggtgagaacgttggtgttctgctgcgtggtatcaagcgtgaagatatcgaacgtggtcaagttcttgctaaaccaggttcgattaaaccacacaccaaatttgaatcagaagtttatattctgagcaaagatgaaggtggtcgccatactccgttcttcaaaggctaccgtcctcagttctacttccgtacaactgatgtaaccggtactattgaactgccagaaggcgttgagatggtgatgccaggtgataacattcaaatgattgttaacctgattgctcctatcgcaatggatgacggcttgcgctttgc

SEQ ID NO: 236 - DNA, 828 bp, Yersinia frederiksenii
  ref <308>: DATABASE ACCESSION NUMBER: ATCC 33641
ggcgcgatcctggttgttgctgccactgatggcccgatgccacagactcgcgagcacattctgttagggcgtcaggtgggtgttccttacatcctggtcttcctgaacaaatgtgacatggttgacgacgaagagctgctggaactggtagaaatggaagttcgtgaacttctgtctcagtacgatttccctggcgacgacactccagttatccgtggttctgcgctgaaagcgctggaaggcgaagctgagtgggaagcaaaaatcatcgaattggctgaggcgctggatagctatattccacagccagagcgtgcgattgataaaccattcctgctgccaatcgaagacgtattctcaatctctggccgtggtactgttgtcaccggtcgtgtagagcgcggtatcgttaaagtcggcgaagaagtcgaaatcgttggtatcattgataccatcaagactacctgtactggtgttgaaatgttccgcaaattgctggacgaaggccgtgcgggtgagaacgttggtgttctgctacgtggtactaaacgtgatgacgtacaacgtggtcaggtattggcaaaaccaggttctatcaagccacacaccaaatttgaatcagaagtttatattctgagcaaagatgaaggtggtcgccatactccgttcttcaaaggttatcgtcctcagttctacttccgtacaactgacgtgaccggtactatcgaactgccagaaggcgttgagatggtgatgccaggtgataacattcaaatgattgttaacctgattgctcctatcgcaatggatgacggtctgcgctttgcg

SEQ ID NO: 237 - DNA, 813 bp, Yersinia intermedia
  ref <308>: DATABASE ACCESSION NUMBER: ATCC 29909
cttggttgtcgctgcaactgatggtcctatgccacagactcgcgagcacatcctgctaggtcgtcaggtgggtgttccttacatcctggtcttcctgaacaagtgtgacatggttgacgatgaggagttgctggaattggtagaaatggaagtccgcgaacttctgtctcaatatgatttccctggcgatgatactcctgttatccgtggttcagcgctgaaggcgttggaaggcgagcctgaatgggaagcaaaaattatcgaattagctgaggcgctggatagttatattccacagccagagcgcgcgattgatagaccattcttgctgccaatcgaagacgtattctctatctcaggtcgtggtacagtcgtcactggtcgtgtagagcgtgggatcgttaaagttggcgaagaagttgaaatcgttggtattatcgattccattagaacaacatgtactggcgttgaaatgttccgcaaattgctggacgaaggccgcgcgggtgagaacgttggtgttctactgcgtgggactaaacgtgatgacgtacagcgtggtcaggtattagctaagccaggttctatcaagccacatactaaattcgaatccgaagtttatattctgagcaaagatgaaggcgggcgtcacacgccgttcttcaaaggctaccgtcctcagttctacttccgtacaacggatgtaaccggtactattgaattgccagacggcgttgagatggtgatgccaggtgataacattcaaatgattgttaacctgattgcacctattgcgatggatgatggtctgcg

SEQ ID NO: 238 - DNA, 829 bp, Yersinia pestis
  strain KIM D27
ggagcgatcttggttgttgctgcaaccgatggccctatgccgcagactcgtgagcatatcctgctgggccgccaggttggtgtcccatacattattgtcttcctgaacaaatgtgacatggttgacgatgaagagttgctagagttggttgaaatggaggttcgtgagcttctgtctcaatacgatttcccaggcgacgacactccagtcatccgtggttcagcgttgaaagccctggaaggtgacgctgagtgggaagctaaaattatcgagttggcagaagctctggatagctatattccgcaaccagaacgcgctattgatagaccattcctattgccaattgaagacgtattctctatttctggtcgtggtactgtagttactggtcgtgtagaacgtggtattgttaaggtcggcgaagaagttgaaatcgttggtattatcgatacgattaaaacaacttgtactggcgttgaaatgttccgcaagctgctggatgaaggccgtgctggtgaaaatgttggtgttctgctgcgtggtactaagcgtgacgatgttcagcgtggtcaagtactggcgaaaccaggttctatcaagccacacacgaagtttgagtcagaagtttatattctgagcaaagatgaaggcggccgtcatacaccgttcttcaagggctaccgtcctcagttctacttccgtacaactgacgtgaccggtaccattgagctgccagaaggcgttgaaatggtcatgcctggtgacaacgtaaacatggttgttaacctaattgctcctatcgcaatggatgatggtctgcgcttcgcaa

SEQ ID NO: 239 - DNA, 817 bp, Yersinia pseudotuberculosis
  ref <308>: DATABASE ACCESSION NUMBER: ATCC 29833
tggagcgatcttggttgttgctgcaaccgatggccctatgccgcagactcgtgagcatatcctgctgggccgccaggttggtgtcccatacattattgtcttcctgaacaaatgtgacatggttgacgatgaagagttgctagagttggttgaaatggaggttcgtgagcttctgtctcaatacgatttcccaggcgacgacactccagtcatccgtggttcagcgttgaaagccctggaaggtgacgctgagtgggaagctaaaattatcgagttggcagaagctctggatagctatattccgcaaccagaacgcgctattgatagaccattcctattgccaattgaagacgtattctctatttctggtcgtggtactgtagttactggtcgtgtagaacgcggtattgttaaggtcggcgaagaagttgaaatcgttggtattatcgatacgattaaaacaacttgtactggcgttgaaatgttccgcaagctgctggatgaaggccgtgctggtgaaaatgttggtgttctgctgcgtggtactaagcgtgacgatgttcagcgtggtcaagtactggcgaaaccaggttctatcaagccacacacgaagtttgagtcagaagtttatattctgagcaaagatgaaggcggccgtcatacaccgttcttcaagggctaccgtcctcagttctacttccgtacaactgacgtgaccggtaccattgagctgccagaaggcgttgaaatggtcatgcctggtgacaacgtaaacatggttgttaacctaattgctcctatcgcaatggatgatggt

SEQ ID NO: 240 - DNA, 829 bp, Yersinia rohdei
  ref <308>: DATABASE ACCESSION NUMBER: ATCC 43380
tggcgcgatcctggttgttgctgcaactgatggcccaatgccacagactcgcgagcacatcctgttgggtcgtcaagtgggtgttccttacatcttagtcttcctgaacaagtgtgacatggttgacgacgaagagttgctggaactggttgaaatggaagttcgtgagcttctgtctcaatacgatttccctggcgatgacactccggttattcgtggttccgcgctgaaagcgctggaaggcgaggccgagtgggaagccaaaattattgaacttgctgaagcactggatagctacattccacagccagagcgcgcgattgataaaccattcttgctgccaatcgaagacgtattctctatctcaggccgtggaacagttgttaccgggcgtgttgagcgcggtatcgtcagagtgggcgaagaagttgaaatcgtgggtatcatcgacaccattaaaaccacttgtaccggtgttgaaatgttccgcaaactgctggacgaaggccgtgccggtgagaacgttggtgttctgctgcgcggtactaaacgcgatgacgtgcaacgtggtcaagtgttggctaaaccaggttctattaagccgcataccaaatttgagtcagaagtttatattctgagcaaagatgaaggtggtcgtcatactccgttcttcaaaggttaccgtccacagttctacttccgtacaactgacgtgaccggtaccatcgaactgccagacggtgttgagatggtgatgccaggtgataacattcaaatgattgttaacctgattgcgcctattgcaatggatgacggtctacgatttgca

SEQ ID NO: 241 - DNA, 804 bp, Yokenella regensburgei
  ref <308>: DATABASE ACCESSION NUMBER: ATCC 35313
tggcgcgatcctggttgttgctgcgactgacggcccgatgccgcagactcgtgagcacatcctgctgggtcgtcaggtaggcgttccgtacatcatcgtgttcctgaacaaatgcgacatggttgatgacgaagagctgctggaactggtagaaatggaagttcgtgaacttctgtctcagtacgatttcccgggcgacgacactccgatcatccgtggttctgctctgaaagcgctggaaggcgaagcagagtgggaagctaaaatcgttgagctggctggcttcctggattcttacatcccagaaccagttcgtgctatcgacctgccgttcctgctgccgatcgaagacgtattctccatctccggtcgtggcaccgttgttaccggtcgtgtagagcgcggtatcgttaaagttggcgaagaagttgaaatcgttggtatcaaagagactgctaagtctacctgtaccggcgttgaaatgttccgcaaactgctggacgaaggccgtgctggtgagaacgttggtgttctgctgcgtggtatcaaacgtgaagaaatcgaacgtggtcaggtactggctaagccgggttccatcaagccgcacaccaaattcgaatctgaagtttatatcctgtccaaagacgaaggcggccgtcatactccgttcttcaaaggctaccgtccgcagttctacttccgtacaactgacgtgactggtaccatcgaactgccggaaggcgtagagatggtaatgccgggcgacaacatcaaaatggttgttaccctgatccacccgatcgc

SEQ ID NO: 242 - DNA, 849 bp, Achromobacter xylosoxidans subsp. denitrificans
  ref <308>: DATABASE ACCESSION NUMBER: ATCC 15173
tcagttcccccgcgatcacatgcccaagatctacgaagcgcttactctggccgacgagggttcctcgttcgccgaaaagggtctgacgctggaagtgcagcaacagctgggcgacggcgtggtgcgtaccatcgcgctgggctccagcgacggcctgcgccgcggtatgaaggtcaccggtacgggcgcgccgatctcggtgccggtcggcaccggcacgctgggccgcatcatggacgtgctgggtcgtcccatcgacgaagccggcccgatccagcacgaagaaaagcgtggcattcaccagccggctccccgtttcgacgaactgtcgccgtcggtggaactgctggaaaccggcatcaaggttattgacctggtctgcccgttcgccaagggcggcaaggtcggcctgttcggcggcgccggcgtgggcaagaccgtcaacatgatggaactgatcaacaacatcgccaagcagcacagcggcttgtcggtgttcgccggcgtgggcgagcgtacccgcgaaggcaacgacttctaccacgaaatggaagagtcgaacgttctggacaaggttgcgatggtgttcggtcagatgaacgaacccccgggcaaccgtctgcgcgtggcgctgaccggcctgaccatggccgagaagttccgcgacgaaggccgcgacatcctgttcttcgtggacaacatctaccgctacaccctggccggtacggaagtgtccgcgctgctgggccgtatgccgtcggcagtgggctaccagcccacgctggccgaagaaatgggcaagctgcaagagcgcatcacctcgaccaagaccggctcgatcacctcgat

SEQ ID NO: 243 - DNA, 787 bp, Acinetobacter baumannii
  ref <308>: DATABASE ACCESSION NUMBER: ATCC 19606
tgaaactactttagaagttcagcaacaacttggtgatggtgttgttcgtaccatcgcaatgggttctacagaaggtcttaaacgtggtcttactgtaactagcacaaacgcaccgatctctgttccagttggtacagccactcttggccgtatcatggacgttttaggtcgtcctatcgatgaagcaggtcctgttgcgactgaagaacgtttgccgattcaccgtcaagcgccttcttatgctgaacaagcagcttctactgaccttttagaaactggtattaaagtcatcgacttactttgcccgtttgcgaaaggtggtaaagttggtttattcggtggtgctggtgttggtaaaaccgttaacatgatggaattgatcaacaacatcgcgaaagcacactcaggtttatctgtgtttgctggtgttggtgagcgtactcgtgaaggtaatgacttctatcacgaaatgaaagattctaacgttcttgacaaagtagcaatggtctacggtcagatgaacgagccaccaggtaaccgtttacgcgtagcgttaactggtttgactatggctgaatacttccgtgatgaaaaagacgaaaacggtaaaggtcgtgacgtattattattcgtcgacaacatctaccgttatacacttgcaggtactgaagtatcagcattgttaggtcgtatgccatctgcggtaggttaccaacctacacttgcagaagaaatgggtgttcttcaagagcgtattacatctactaaatctggttcgatcacttcg

SEQ ID NO: 244 - DNA, 825 bp, Acinetobacter lwoffii
  strain CDCF 3697
gttcctaagatctatgacgctctccacgttgatggcactgaaactacattagaagttcagcaacaacttggtgatggcgtagttcgtactattgcaatgggttctactgaaggccttaagcgtggtttgaacgtaactaacactaacgcgccgatttctgtaccagtaggtacagcgactctaggtcgtatcatggacgttcttggtcgcccaatcgacgaagctggtccagttgcgactgaagcgcgtttgccgattcaccgtcaagcaccttcttatgctgaacaagcagcttctactgaccttttagaaactggtattaaagtcatcgacttactttgcccgttcgctaaaggtggtaaagttggtctgttcggtggtgccggtgttggtaaaactgtaaacatgatggagttgatcaacaacatcgctaaagcgcactcaggtttatctgtattcgctggtgttggtgagcgtactcgtgaaggtaatgacttctatcacgagatgaaagactcaaacgttctagacaaagtagcaatggtctacggtcagatgaacgagccaccgggtaaccgtttacgcgtagcgttgactggtttgaccatggctgagtacttccgtgacgagaaagacgaaaacggcaaaggccgtgacgtactattgttcgtagataacatctaccgttatacactagcaggtactgaagtatcagcacttctaggtcgtatgccgtctgcagtaggttaccaaccgacacttgcagaagagatgggtgttcttcaagaacgtattacatcgactaagtctggttcgattacgtca

SEQ ID NO: 245 - DNA, 837 bp, Staphylococcus saprophyticus
  strain CSG 197
caatgaagttccagaaattaacaatgccttagtcgtagacgttgaaagagatgaaggtacagtatctcttacattagaagtggcattacaacttggcgatgatgtcgtacgtacaattgcaatggattctactgatggtgttaaacgtggtacagaagttcgagatagcggagatagcatcagtgttccagttggtgatgctacgttaggacgtgtgtttaatgttcttggtgatacaattgacttagacgagaagcttgatacttctgtcaaacgtgatccaattcatagagaagcacctgcattcgatcaattatcaacaaaagttgaaatcttagaaacaggtattaaagtaattgatttacttgcaccatatattaaaggtggtaaaatcggtttattcggtggcgctggtgtaggtaaaacagtattaattcaagaattaattaataatatagctcaagaacatggtggtatttcagtatttgccggcgtaggtgaacgtacgcgtgaaggtaatgacttatactacgaaatgagtgatagtggtgttattaagaaaacagctatggtcttcggacaaatgaatgagccacctggtgcgcgtatgcgtgttgctttatcaggcttaacaatggctgaacacttccgtgatgtacaaggacaagatgttttactatttattgataacatattcagatttacgcaagctggttcagaagtatcagcactattaggtcgtatgccatcagccgttggttatcaacctacccttgctactgaaatgggtcaattacaagaacgtattacatcaacaactaaaggatctgtaacgtc

SEQ ID NO: 246 - DNA, 851 bp, Alcaligenes faecalis
  ref <308>: DATABASE ACCESSION NUMBER: ATCC 15554
ttcccccgcgacagcatccctaaagtctacgaagcattgacgctcgttgacgaaagttcggctttcgcagaaaaaggcctgacttttgaagtacagcaacaattgggtgacggtgtagttcgcaccatcgccatgggttccagcgacggcctgcgccgcggtatggaagtggccggttcgggcgctcccatctccgttcccgtgggtgtcggcaccctgggtcgcattatggacgttctgggtcgccctattgacgaagtcggtcctattcagtccgacgagcgtcgcgccattcaccagcctgcgcctactttcgacgaactgtcgccttccgtagagctgctggaaaccggtattaaagtgattgacctggtttgcccgttcgccaagggtggtaaggttggtctgttcggtggtgccggtgtgggcaagaccgtgaacatgctggagctgatcaacaacatcgccaaggcacacagcggtctgtccgtgtttgccggtgtgggtgagcgtacccgtgaaggtaacgacttctaccacgaaatggccgatgctggcgttatccagatggacaacctgagcgagtccaaagtggccatggtgttcggtcagatgaacgaacctccaggcaaccgtctgcgtgtggcactgtccggcctgaccatggccgagaagttccgtgacgaaggccgtgacatcctgttctttgtggacaacatctaccgctacacgctggccggtacagaagtgtccgctctgctgggtcgtatgccttccgcagtgggttaccagcctacgctggccgaggaaatgggtaagctgcaagagcgcattacctccaccaagaccgg

SEQ ID NO: 247 - DNA, 846 bp, Bacillus anthracis
  strain 4229
gatggcggaaagctaccagaaatctacaacgcccttacggtaaaacagagcaacgaaaacggaacaagcattaacttaacatttgaagttgcacttcatttaggtgatgacacagttcgtacagttgcaatgtcttccacagatggacttgttcgtggcacagaagtagaagatactggtaaagcaatctctgtaccagttggtgatgcaacacttggtcgtgtatttaacgtattaggtgatgcaattgacttagatggtgaggttcctgcggatgtacgtcgtgatccaattcaccgtcaagcacctgcattcgaagaattatctactaaagtagaaattcttgaaactggtattaaagtagtagacttacttgctccttacattaagggtggtaagatcggtctattcggtggtgccggtgtaggtaaaacggtattaattcaggaattaatcaataacatcgcacaagaacacggtggtatctctgtattcgctggtgtaggtgagcgtactcgtgagggtaatgacttataccacgaaatgagcgattctggcgtaattaagaaaactgcgatggtattcggacaaatgaacgagccacctggagcacgtcaacgtgttgcgttaacaggtttaacaatggctgagcatttccgtgatgagcaaggacaagatgtacttctgttcatcgataatatcttccgtttcacgcaagcaggttctgaagtatctgcccttcttggccgtatgccatctgcggtaggttaccaaccaacacttgcaacagaaatgggtcaattacaagagcgtattacatctacaaataaagggtctatcacgtct

SEQ ID NO: 248 - DNA, 810 bp, Bacillus cereus
  ref <308>: DATABASE ACCESSION NUMBER: ATCC 14579
ccagaaatctacaatgcccttacggtaaaacaaagcaacgaaaacggaagcatgaacttaacatttgaagttgcacttcatttaggtgatgatacagttcgtacagttgcgatgtcttccacagatggacttgttcgtggcacagaagtagaagatactggtaaagcaatctctgtaccagttggtgatgcaacacttggacgtgtattcaacgtattaggtgatgcaattgacttagatggtgaacttcctgcggatgtacaccgtgatccaattcaccgtcaagcacctgcattcgaagaattatctactaaagtagaaattcttgaaactggtattaaagtagtagacttacttgctccttacattaagggtggtaagatcggcctattcggtggtgccggcgtaggtaaaacagtattaattcaggagttaatcaataacatcgcacaagagcacggtggtatctctgtattcgctggtgtaggtgagcgtactcgtgagggtaatgacttataccacgaaatgagcgattctggcgtaatcaagaaaactgcgatggtattcggacaaatgaacgagccacctggagcacgtcaacgtgttgcattaacaggtttaacaatggctgagcatttccgtgatgagcaaggacaagacgtacttctgttcatcgataacatcttccgtttcacgcaagcgggttctgaagtatctgcccttcttggtcgtatgccatctgcggtaggttaccaaccaacacttgcaacagaaatgggtcaattacaagagcgtattacatctacaaat

SEQ ID NO: 249 - DNA, 944 bp, Bacteroides distasonis
  ref <308>: DATABASE ACCESSION NUMBER: ATCC 8503
ctttgattatgggacagaagaaacagtaaccctcccccgtatccacgacgccatggagatttcccgcccaaacggaaagatcttgatcgtcgaagttcagcaacacatcggggaaaacaccgtccgtaccgtagcgatggatacgaccgacggattgagacgaggcatggaggccgtgtcatacggaatgcccatcaccatgccgaccggcgaccaagtcaaaggacgtttaatgaatgtcaccggcgaccctatcgatggcatggcccagcttactaaagacggggctcttcccatccatcgtgagcctcctaaattcgaggatctgacaacgacccaagaggtcttgtacacgggtattaaagtaatcgatttattggaaccttacgccaaaggaggcaagatcggacttttcggaggagccggagtcggcaaaacggtattgatcatggaattgatcaacaacatcgcaaagaaaaacaacggattctccgtcttcgccggtgtgggtgaacgtacacgtgaaggaaatgacctattgcgtgaaatgatccaatccggtgtcatccgatacggcgaggagtttaagaagagtatggaggcaggcaactgggacttgtcgaagatcgattacgatgaattggctaagtcgcaggctaccttggtattcgggcagatgaacgaaccgccgggcgcccgctcgtccgtggccttatccggtttgacgatcgccgaatccttccgtgacaaagcctctgagggagaaagaaaagatatattattcttcatcgataatatcttccgtttcacccaagccggttccgaggtttccgccttgctggggcgtatgccttccgccgtaggttaccaaccgacattggccacggaaatgggagctatgcaagagcgtatcacttcaaccaagaagggctccatcacctccg

SEQ ID NO: 250 - DNA, 939 bp, Bacteroides ovatus
  ref <308>: DATABASE ACCESSION NUMBER: ATCC 8483
ttgagggtacggatgcagaattggtgctgccaagcatccacgacgcactggagataaagaggccaaacggcaaaatactggttgtagaagttcagcaacatatcggcgaaaatacggtgcgtaccgtagcgatggacagtactgacggacttcagagaggcatgaaagtgtatcccaccggaggcccgatcacgatgccgattggcgaacagattaaaggacgactgatgaacgtagtcggtgattcgatcgacggtatgaaaggactcgaccgcaaaggtgcatattccattcatcgcgacccccctaagtttgaggatttgactactgtgcaagaggtgctcttcacaggtatcaaagtgatcgacctgctcgaaccgtatgccaaaggtggtaaaatcggtttgttcggcggtgccggtgtaggaaagactgtattgattcaggaacttatcaataatatcgccaagaaacataatggattctctgtatttgccggagtaggtgaacgtacccgtgaaggtaacgacttgctgcgcgaaatgattgaatccggtgtaatccgttacggcgaagcattcaaagaaggaatggagaaaggtcactgggatctttcgaaagtggattataacgaactggagaaatcgcaagtgtctctgattttcggtcagatgaacgagcctccgggcgcacgtgcctctgtggcattgtccggactgacggtggcggaatctttccgcgacgcaggaaaagaaggtgagaaacgcgatattctgttctttattgataatatcttccgtttcacgcaagcaggttcagaagtgtccgcccttttgggacgtatgccctccgctgttggttaccagcccacgttggctacggaaatgggtgcgatgcaggaacgtatcacgtctacccgcaaaggttctatcacctccg

SEQ ID NO: 251 - DNA, 833 bp, Leclercia adecarboxylata
  ref <308>: DATABASE ACCESSION NUMBER: ATCC 23216
cgaattccctcaggatgccgtaccgcgcgtgtacgatgctcttgaggttcagaatggtaatgagagcctggtgctggaagttcagcagcagctcggcggcggtattgtgcgtaccatcgccatgggttcttccgacggtctgcgtcgtggtctggaagttaaagacctcgagcacccaatcgaagtaccagtaggtaaagcaaccctgggccgtatcatgaacgtcctgggtcagccgatcgacatgaaaggcgacatcggcgaagaagagcgttgggctatccaccgttcagcaccttcctatgaagagctgtccagctctcaggaactgctggaaaccggcatcaaagttatcgacctgatgtgtccgttcgcgaagggcggtaaagttggtctgttcggcggtgcgggtgtaggtaaaaccgtaaacatgatggagctgatccgtaacatcgcgatcgagcactccggttactccgtgtttgcaggcgtgggtgagcgtactcgtgagggtaacgacttctaccacgaaatgaccgactccaacgttctggacaaagtatccctggtttacggccagatgaacgagccaccaggaaaccgtctgcgcgttgcgctgaccggcctgaccatggctgagaagttccgtgacgaaggtcgtgacgtactgctgttcgttgacaacatctaccgttacaccctggccggtacggaagtatccgcactgctgggtcgtatgccatcagcagtaggctaccagccgaccctggcggaagagatgggtgttctgcaggaacgtatcacctctaccaaaaccggttctatcacctccg

SEQ ID NO: 252 - DNA, 819 bp, Stenotrophomonas maltophilia
  CDC F3338
gtgtacgacgcactgaaggtggaaaacaccgagatcaccctcgaagtccagcagcagctgggcgacggcgtggtgcgtaccatcgccctcggttccaccgacggcctgaagcgcaacctggttgccgtcaacaccggccgtggcatctcggtgccggtcggcgccggcaccctgggccgcatcatggacgtgctgggccgtccgatcgacgaagccggcccggtcgctgccagcgacaactgggaaatccaccgcgctgcgccgtcgtatgaagaccagtccccggccaccgagctgctggaaaccggcatcaaggtcatcgacctgatgtgcccgttcgccaagggcggcaaggtcggcctgttcggcggcgccggcgtcggcaagaccgtcaacatgatggaactgatcaacaacatcgccaaggcgcacagcggcctgtccgtgttcgccggcgtgggtgagcgtacccgtgagggcaacgacttctaccacgagatgaaggactccaacgtcctggacaaggtggcgatggtgtacggccagatgaacgagccgccgggcaaccgtctgcgcgtcgccctgaccggcctgaccatggccgagtacttccgcgatgagaaggacgaaaacggcaagggcaaggacgtcctgctgttcgtcgacaacatctaccgctacaccctggccggtaccgaagtgtcggcactgctgggccgcatgccgtccgcggtgggttaccagccgaccctggccgaggaaatgggcgtcctgcaggagcgcatcacctcgaccaagaatggttcgatcacctcgatc

SEQ ID NO: 253 - DNA, 864 bp, Bartonella henselae
  ref <308>: DATABASE ACCESSION NUMBER: ATCC 49882
agtttgaaggccctttgccaaatattctcaatgcattagaaacagataatttgggcaatcggctagttttagaagttgctcagcatttgggtgaaaataccgtgcgtaccattgccatggatactaccgatggtcttgtccgtggtcaaaaagtttttgatacaggaacacagatcagtgttcccgtgggagaagcaacacttggtcgtattatgaatgtgattggagagccggttgataatgttggcccaattgctacaagcaaaacccgttccattcaccaagaggctcctgaatatgtggagcaatcaaccgcatcagaaatccttgtgactggtattaaagtcgttgatctgttagctccttattctaaaggggggaaggttggtttgtttggaggtgccggtgttggtaaaaccgttctcattatggagcttatcaacaatattgcaaaggcgcatggtggctattcagtgtttgccggtgttggtgaacgtacacgtgagggaaatgatctttattatgaaatgatcgaaagccgtgtgaatgtgaatccaaaagacaacaatggttcaacagaaggatcaaaatgtgcactcgtttatgggcaaatgaatgaaccaccaggggcgcgtgcacgtgtggctctttcaggattgaccattgcagaaagtttccgtgatgagggacaagatgttttgttcttcgtagataatattttccgttttacgcaagcaggcgctgaagtgtcagctcttttagggcgtattccttctgctgtagggtatcagccaactttggcaactgatatgggggctttgcaagagcgtattaccagtacaagaacaggctctattacctctg

SEQ ID NO: 254 - DNA, 866 bp, Bifidobacterium adolescentis
  ref <308>: DATABASE ACCESSION NUMBER: ATCC 15703
ttcccggtgggccacctgcccgacatttacaatgcacttaccgttgaactgkccaacaccggygtccacgaasagggcgagaccaccaagaagatcacccttgmggttgaacagcatcttggcgattccaccgtgcgtaccgtcgctctgaagccgactgacggccttgtgcgtggcgccaccgtgtatgacaccggcggcccgatctctgtgccggttggcgatgtcaccaagggccacgtattcgacgtgtccggcaacatcctcaacaagaaggccgacgagaccgttaaggttaccgaacgttggtctatccaccgtaacccgccggcattcgaccagctggagtccaagacccagatgttcgaaaccggtatcaaggtcatcgatttgctgaccccgtatgtgcagggcggcaagatcggtctgttcggcggcgcaggcgtcggcaagaccgtgctgatccaggaaatgattcagcgtgtggctcagaaccacggcggtgtgtccgtgttcgcaggcgtcggcgagcgtacccgtgagggtaacgatctgatcggcgaaatggacgaagccggcgtgctcgagaagaccgcactggtcttcggccagatggatgagcagccgggtacccgtctgcgcgtgccgctgaccgcactgaccatggcagagtacttccgtgacgtacagaatcaggacgtgctgctgttcatcgataacatcttccgtttcacccaggctggttccgaggtgtccaccctgctcggccgtatgccgtccgcagtgggctaccagccgaacctggccgatgagatgggcgcgctgcaggagcgaatcacttcgacccgtggacactccatcacctc

SEQ ID NO: 255 - DNA, 842 bp, Brucella abortus
  strain S2308
aaggccagctgccgctgatcctgaacgcgcttgaagtggacaatcagggccatcgtctggttctcgaagttgcccagcacctcggcgaagacaccgtgcgcaccatcgccatggacgcgaccgaaggtctcgttcgcggtcaggaagcacgcgacactggcgaaccgatcatggtgccggtcggcgtcgaaacgcttggccgcatcatgaacgtcatcggcgagccggttgacgaagcaggccccatcaagaccaaggcaacccgcgccatccaccagaacgcgccggaatatatcgaacagtcgaccgaagccgaaattctggtcacgggcatcaaggtcgtcgaccttctggcgccttacgccaagggcggcaagatcggcctcttcggcggtgcaggcgtcggcaagaccgttctcatcatggaactcatcaacaacgtcgccaaggcgcacggcggttattccgtgttcgcaggcgtcggtgagcgtacccgtgagggcaacgacctttaccacgaaatgatcgagtcgggcgtgaacaagctcggcggcggcgaaggctccaaggcagccctcgtttacggccagatgaacgaacccccgggtgcccgcgcccgcgttgccctttccggtctgacggttgctgaaaacttccgtgaccagggccaggacgttctgttcttcgtggacaacatcttccgcttcacgcaggcaggttcggaagtgtcggctcttctcggccgtattccttccgctgtgggttatcagccgacgctggcaaccgacatgggcgccatgcaggaacgcatcaccacgacgaccaagggttcgatcacctcg

SEQ ID NO: 256 - DNA, 833 bp, Cedecea davisae
  ref <308>: DATABASE ACCESSION NUMBER: ATCC 33431
cgagttccctcaggacggcgtaccgcgcgttkatgatgcgcttgaagtacaaaataacagcgagcagctggtgctggaagttcagcagcagctcggcggcggtatcgtgcgtaccatcgctatgggttcttccgacggtctgcgtcgtggtctggaagttaaagacctcgagcacccgatcgaagtcccggtaggtaaagcgacccttggccgtatcatgaacgtgctgggtcagccgatcgacatgaaaggcgatatcggcgaagaagaccgttgggctattcaccgcgctgcaccttcctatgaagagctgtccagctctcaggaactgctggaaaccggcatcaaagtaatcgaccttatctgtccgttcgctaagggcggtaaagtaggtctgttcggtggtgcgggcgtgggtaaaaccgtaaacatgatggagcttatccgtaacatcgcgatcgagcactccggctactccgtgtttgcgggcgtgggtgagcgtactcgtgagggtaacgacttctatcacgaaatgaccgactccaacgttctggacaaagttgccctggtttacggccagatgaacgagccaccgggtaaccgtctgcgcgtagcgctgaccggtctgaccatcgcggagaaattccgtgacgaaggtcgtgacgttctgctgttcgttgataacatctaccgttacaccctggccggtactgaagtatccgcgctgctgggtcgtatgccttctgcggtaggttaccagccaactctggcggaagagatgggtgttcttcaggagcgtattacctccaccaagaccggttccatcacctccg

SEQ ID NO: 257 - DNA, 829 bp, Cedecea lapagei
  ref <308>: DATABASE ACCESSION NUMBER: ATCC 33432
ttccctcaggacggcgtaccgcgcgtatatgacgcgcttgaggtacagaataacagcgagaagctggtgctggaagttcagcagcagctcggcggcggtatcgtacgtaccatcgcaatgggttcttccgacggtctgcgtcgtggtctggaagtgaaagacctcgagcacccgatcgaagtcccggtaggtaaagcgactctgggtcgtatcatgaacgtgctgggtcagccaattgatatgaaaggcgacatcggcgaagaagatcgttgggcgattcaccgcgcagcaccttcctatgaagagctgtccagctctcaggaactgctggaaaccggcatcaaagttatcgacctgatttgtccgttcgctaagggcggtaaagttggtctgttcggtggtgcgggcgtaggtaaaaccgtaaacatgatggagctgatccgtaacatcgcgatcgagcactccggttactccgtgtttgcaggcgtgggtgagcgtactcgtgagggtaacgacttctaccacgagatgaccgactccaacgttctggacaaagttgcactggtttacggccagatgaacgagccgccaggtaaccgtctgcgcgtagcgctgaccggtctgaccatcgcggagaaattccgtgacgaaggccgtgacgttctgctgttcgtcgataacatctatcgttataccctggccggtacagaagtttctgcactgctgggtcgtatgccatctgcggtaggttatcagcctactctggcagaagagatgggtgttcttcaggagcgtattacctccaccaagaccggttccatcacttccg

SEQ ID NO: 258 - DNA, 830 bp, Cedecea neteri
  ref <308>: DATABASE ACCESSION NUMBER: ATCC 33855
tccctcaggacggcgtaccgcgcgtttatgacgcgcttgaggtacagaacaacaatgagaagctggtgctggaagttcagcagcagctcggcggcggtatcgtgcgtaccatcgcaatgggttcttccgacggtctgcgtcgtggtctggtagtaacagacctcgagcacccgatcgaagtcccggtaggtaaagcgacccttggccgtatcatgaacgtgctgggtcagccgatcgacatgaaaggcgacatcggcgaagaagaccgttgggcgattcaccgcgcagcaccttcctacgaagagctgtccagctctcaggaattgctggaaaccggcatcaaagttatcgacctgatttgtccgttcgctaagggcggtaaagtaggtctgttcggtggtgcgggcgtaggtaaaaccgtaaacatgatggagctgatccgtaacattgcgatcgagcactccggttattccgtgtttgcgggcgtgggtgagcgtactcgtgagggtaacgacttctaccacgaaatgaccgactccaacgttctggataaagtagcactggtttacggccagatgaacgagccaccaggtaaccgtctgcgcgtagcgctgaccggtctgaccatcgcggaaaaattccgtgacgaaggccgcgacgttttgctgttcgttgataacatctaccgttataccctggccggtaccgaagtatctgcactgctgggtcgtatgccttctgcggtaggttatcagccaactctggcagaagagatgggtgttcttcaggagcgtattacctccaccaagaccggttctatcacctccgta

SEQ ID NO: 259 - DNA, 931 bp, Chryseobacterium meningosepticum
  strain CDC B7681
tttcaggaagtagaggaactaccaaacatttatgacgcacttgaagttgtcagagaaggccagaaaggtctgatcttagaagttgaacaacacatcggtgaggatacagtgagatgtatcgctatggatgcaacagacggacttcaaagaggacaatctgtaataggacatggaagacaaattactatgcctattggtgaagaagtaaatggtagattgttcaacgtggtaggagatgctatcgacggacttcaggaattatctaaagacaatggtttgccaatccacagagaagcacctaaattcgatcagttatcaacttctgctgaagtactatatacaggtatcaaagtaatcgaccttatcgagccttatgcaaaaggtggtaaaattggtttgttcggtggtgctggtgtaggtaaaacagtattgatccaggaattgattaataacattgctaaaggacacggtggtctttctgtattcgcaggagtaggtgagagaacaagagaaggaaatgaccttcttcgtgagatgttagagtctggtattattaaatatggtgacgaattcatgcattctatggagaacggtggatgggatctttctaaagttgacagtgagttgatgaaagagtctaaagctgctttcgttttcggacagatgaacgagccaccaggtgcaagagcacgtgtagccctttctggtcttactttagctgaatactaccgtgatggtggcgaaagcggacaaggtagagacgttcttttcttcgtagacaacatcttccgttttacacaggctggttctgaggtgtctgcacttctaggtcgtatgccttcagcggtaggttaccaaccaactctagcttctgagatgggtgcaatgcaggagagaattacttcaactaaaaacggatctattacatctg

SEQ ID NO: 260 - DNA, 726 bp, Citrobacter amalonaticus
  ref <308>: DATABASE ACCESSION NUMBER: ATCC 25405
gtatcgtacgtaccatcgcaatgggttcttccgacggtctgcgtcgtggtctggaagtcaaagacctcgagcacccgatcgaagtcccggtaggtaaagcaaccctgggtcgtatcatgaacgtcctgggtcacccgatcgacatgaaaggcgatatcggtgaagaagagcgttgggctatccaccgcgcagcaccgtcctatgaagagctgtccagctctcaggaactgctggaaaccggtatcaaagttatcgacctgatgtgtccgttcgcgaasggcggtaaagtgggtctgttcggtggtgcgggtgtaggtaaaaccgtaaacatgatggagcttatccgtaacatcgcgatcgagcactccggttactccgtgtttgcgggcgtaggtgaacgtactcgtgagggtaacgacttctaccacgaaatgaccgactccaacgttctggataaagtatccctggtatatggccagatgaacgagccgccgggaaaccgtctgcgcgttgcactgaccggtctgaccatggcagagaaattccgtgacgaaggtcgtgacgtactgctgttcgtcgataacatctatcgttacaccctggccggtacggaagtttccgcactgctgggtcgtatgccatcagcggtaggttaccagccgaccctggcggaagagatgggtgttctgcaggaacgtatcacttctaccaaaaccggttctatca

SEQ ID NO: 261 - DNA, 812 bp, Citrobacter braakii
  ref <308>: DATABASE ACCESSION NUMBER: ATCC 43162
gccgtaccgcgcgtgtacgatgctcttgaggttatgaatggtaaagagagcctggtgctggaagttcagcagcagctcggcggcggtatcgtacgtaccatcgccatgggttcttccgacggtctgcgtcgtggtctggaagttaaagatctcgagcacccgatcgaagtcccggtaggtaaagcaactctgggtcgtatcatgaacgtcctgggtcacccgatcgacatgaaaggcgatatcggtgaagaagagcgttgggctatccaccgcgcggcaccttcctatgaagagctgtccagctctcaggaactgctggaaaccggcatcaaagttatcgacctgatgtgtccgttcgctaagggcggtaaagttggtctgttcggtggtgcgggtgtaggtaaaaccgtaaacatgatggagctgatccgtaacatcgcgatcgaacactccggttactccgtgtttgcgggcgtgggtgaacgtactcgtgagggtaacgacttctaccacgaaatgaccgactccaacgttctggataaagtatccctggtatatggccagatgaacgagccgccgggaaaccgtctgcgcgttgctctgaccggtctgaccatggcagagaagttccgtgacgaaggtcgtgacgttctgctgttcgttgataacatctatcgttacaccctggccggtacagaagtatccgctctgctgggtcgtatgccatcagcggtaggctaccagccgaccctggcggaagagatgggtgttcttcaggaacgtatcacctctaccaaaaccggttctatcac

SEQ ID NO: 262 - DNA, 811 bp, Citrobacter koseri
  ref <308>: DATABASE ACCESSION NUMBER: ATCC 27156
gcgcgtgtacgacgcccttgaggtgcagaatggtaatgaacatctggtgctggaagttcagcagcagctcggtggcggtatcgtacgtaccatcgccatgggttcttccgacggcctgcgtcgtggtctggatgtgaaagaccttgagcacccgatcgaagtcccggtaggtaaagcaacgctgggtcgtatcatgaacgtactgggcgaaccagtagacatgaaaggcgagatcggtgaagaagagcgttgggctatccaccgtgcggcaccgtcctacgaagagttgtcaaactctcaggaactgctggaaaccggtatcaaagttatcgacctgatgtgcccgttcgcgaagggcggtaaagtgggtctgttcggtggtgcgggtgtaggtaaaaccgtaaacatgatggagctgatccgtaacatcgcgatcgaacactccggttactccgtgtttgcgggcgtaggtgaacgtactcgtgagggtaacgacttctaccacgaaatgaccgactccaacgttatcgacaaagtatccctggtttacggccagatgaacgagccgccgggaaaccgtctgcgcgttgcgctgaccggcctgaccatggcggagaaattccgtgacgaaggtcgtgacgttctgctgttcgtcgacaacatctaccgttacaccctggccggtacggaagtatccgcactgctgggtcgtatgccttcagcggtaggttaccagccgaccctggcggaagagatgggtgttttgcaggaacgtatcacctccaccaaaaccggttctatcacctccgta

SEQ ID NO: 263 - DNA, 816 bp, Citrobacter farmeri
  ref <308>: DATABASE ACCESSION NUMBER: ATCC 51112
gatgccgtaccgcgcgtgtacgatgctcttgaggttatgaatggtaaagagagtctggtgctggaagttcagcagcagctcggcggcggtatcgtacgtaccatcgcgatgggttcttccgacggtctgcgtcgtggtctggaagtaaaagacctcgaacacccgatcgaagtcccggtaggtaaagcaactctgggtcgtatcatgaacgtcctgggtcacccgatcgacatgaaaggcgatatcggtgaagaagagcgttgggctatccaccgcgcagcgccatcctatgaagagctgtccagctctcaggaactgctggaaaccggtatcaaagttatcgacctgatgtgtccgtttgcgaagggcggtaaagtcggtctgttcggtggtgcgggtgtaggtaaaaccgtaaacatgatggaactcatccgtaacatcgcgatcgagcactccggttactccgtgtttgcgggcgtaggtgaacgtactcgtgagggtaacgacttctaccacgaaatgaccgattccaacgttctggataaagtatccctggtatatggccagatgaacgagccgccgggaaaccgtctgcgcgttgcgctgaccggtctgaccatggcagagaaattccgtgacgaaggtcgtgacgtactgctgttcgtcgataacatctatcgttacaccctggccggtacggaagtatccgcactgctgggccgtatgccatcagcggtaggctaccagccaaccctggcggaagagatgggtgttctgcaggaacgtatcacttctaccaaaaccggttctattacc

SEQ ID NO: 264 - DNA, 819 bp, Citrobacter freundii
  ref <308>: DATABASE ACCESSION NUMBER: ATCC 8090
aggatgccgtaccgcgcgtgtacgatgctcttgaggttatgaatggtaaagagagcctggtgctggaagttcagcagcagctcggcggcggtatcgtacgtaccatcgccatgggttcttctgacggtctgcgtcgtggtctggaagttaaagacctcgagcacccgatcgaagtcccggtaggtaaagcaacgctgggtcgtatcatgaacgttctgggtcacccgatcgacatgaaaggcgatatcggtgaagaagagcgttgggctatccaccgtgcagcaccttcctacgaagagctgtcaagctctcaggaactgctggaaaccggtatcaaagttatcgacctgatgtgtccgttcgctaagggcggtaaagttggtctgttcggtggtgcgggtgtaggtaaaaccgtaaacatgatggagctgatccgtaacatcgcgatcgaacactccggttactccgtgtttgcgggcgtaggtgaacgtactcgtgagggtaacgacttctaccacgaaatgaccgactccaacgttctggacaaagtatccctggtatatggccagatgaacgagccgcctggaaaccgtctgcgtgttgcgctgaccggtctgaccatggctgagaagttccgtgacgaaggtcgtgacgttctgctgttcgttgataacatctatcgttacaccctggccggtacagaagtatctgcactgctgggtcgtatgccatcagcggtaggctaccagccgaccctggcggaagagatgggtgttctgcaggaacgtatcacctccaccaaaaccggttctatcacct

SEQ ID NO: 265 - DNA, 822 bp, Citrobacter koseri
  ref <308>: DATABASE ACCESSION NUMBER: ATCC 27028
gatgccgtaccgcgcgtgtacgacgcccttgaggtgcagaatggtaatgaacatctggtgctggaagttcagcagcagctcggtggcggtatcgtacgtaccatcgccatgggttcttccgacggcctgcgtcgtggtctggatgtgaaagaccttgagcacccgatcgaagtcccggtaggtaaagcaacgctgggtcgtatcatgaacgtactgggcgaaccagtagacatgaaaggcgagatcggtgaagaagagcgttgggctatccaccgtgcggcaccgtcctacgaagagttgtcaaactctcaggaactgttggaaaccggtatcaaagttatcgacctgatgtgtccgttcgcgaagggcggtaaagtgggtctgttcggtggtgcgggtgtaggtaaaaccgtaaacatgatggagctgatccgtaacatcgcgatcgaacactccggttactccgtgtttgcgggcgtaggtgaacgtactcgtgagggtaacgacttctaccacgaaatgaccgactccaacgttatcgacaaagtatccttggtttacggccagatgaacgagccgccgggaaaccgtctgcgcgttgcgctgaccggcctgaccatggcggagaaattccgtgacgaaggtcgtgacgttctgctgttcgtcgacaacatctaccgttacaccctggccggtacggaagtatccgcactgctgggtcgtatgccttcagcggtaggttaccagccgaccctggcggaagagatgggtgttttgcaggaacgtatcacctccaccaaaaccggttctatcacctccgta

SEQ ID NO: 266 - DNA, 820 bp, Citrobacter sedlakii
  ref <308>: DATABASE ACCESSION NUMBER: ATCC 51115
gatgccgtaccgcgcgtgtacgacgcccttgaggtacagaatggtaatgagcgtctggtgctggaagttcagcagcagctcggtggcggtattgtacgtaccatcgccatgggttcttccgacggtctgcgtcgtggtctggaagtaaaagaccttgagcacccgatcgaagtcccggtaggtaaagcaacgctgggtcgtatcatgaacgtactgggcgaaccagtagacatgaaaggcgacatcggtgaagaagagcgttgggctatccaccgtgccgcgccgtcctatgaagagttgtctaactctcaggaactgctggaaaccggcatcaaagttatcgacctgatgtgtccgttcgcgaagggcggtaaagtcggtctgttcggtggtgcgggcgtaggtaaaaccgtaaacatgatggagctgatccgtaacatcgcgatcgagcactccggttactctgtgtttgcgggcgtgggtgaacgtactcgtgagggtaacgacttctaccacgaaatgaccgactccaacgttatcgacaaagtatccctggtgtacggccagatgaacgagccgcctggaaaccgtctgcgcgtcgcactgaccggtctgaccatggctgagaagttccgtgacgaaggtcgtgacgttctgctgttcgtcgataacatctatcgttacaccctggccggtacggaagtatccgcactgctgggtcgtatgccttcagcggtaggttatcagccgactctggcggaagagatgggtgttctgcaggaacgtatcacctcaaccaaaaccggttctatcacctccg

SEQ ID NO: 267 - DNA, 806 bp, Citrobacter werkmanii
  ref <308>: DATABASE ACCESSION NUMBER: ATCC 51114
gccgtaccgcgcgtgtacgatgctcttgaggttatgaatggtaaagagagcctggtgctggaagttcagcagcagctcggcggcggtatcgtacgtaccatcgccatgggttcttccgacggtctgcgtcgtggtctggaagttaaagaccttgagcacccgatcgaagtcccggtaggtaaagcaaccctgggtcgtatcatgaacgtcctgggtcatccgatcgacatgaaaggcgatatcggtgaagaagagcgttgggctatccaccgcgcagcacctacctatgaagaactgtccagttctcaggaactgctggaaaccggcatcaaagttatcgacctgatgtgtccgttcgcgaagggcggtaaagttggtctgttcggtggtgcgggtgtaggtaaaaccgtaaacatgatggagctgatccgtaacatcgcgatcgaacactccggttactcagtgtttgcgggcgttggtgaacgtactcgtgagggtaacgacttctaccacgaaatgaccgactccaacgttctggacaaagtatccctggtatatggccagatgaacgagccgccgggaaaccgtctgcgcgttgcgctgaccggtctgaccatggctgagaagttccgtgacgaaggtcgtgacgttctgctgttcgttgataacatctatcgttacaccctggccggtactgaagtatctgcactgctgggtcgtatgccatcagcggtaggctaccagccaaccctggcggaagagatgggtgttctgcaggaacgtatcacctctaccaaaaccggttc

SEQ ID NO: 268 - DNA, 810 bp, Citrobacter youngae
  ref <308>: DATABASE ACCESSION NUMBER: ATCC 29935
gccgtaccgcgcgtgtacgatgctcttgaggttatgaatggtaaagagagcctggtgctggaagttcagcagcagctcggcggcggtatcgtacgtaccatcgccatgggttcttccgacggtctgcgtcgtggtctggaagttaaagacctcgagcacccgatcgaagtcccggtaggtaaagcaacgctgggtcgtatcatgaacgttctgggtcacccgatcgacatgaaaggcgatatcggagaagaagagcgttgggctattcaccgcgcagcaccttcctatgaagagctgtccagctctcaggaactgctggaaaccggcatcaaagttatcgacctgatgtgtccgttcgctaagggcggtaaagttggtctgttcggtggtgcgggtgtaggtaaaaccgtaaacatgatggagcttattcgtaacatcgcgatcgagcactccggttactctgtgtttgcgggtgtaggtgaacgtactcgtgagggtaacgacttctaccacgaaatgaccgattccaacgttctggataaagtatccctggtttatggccagatgaacgagccgccgggaaaccgtctgcgcgttgcgctgaccggtctgaccatggctgagaaattccgtgacgaaggtcgtgacgtactgctgttcgtcgataacatctatcgttataccctggccggtacggaagtatccgcactgctgggtcgtatgccatcagcggtaggttaccagccgaccctggcggaagagatgggtgttctgcaggaacgtatcacttctaccaaaaccggttctatc

SEQ ID NO: 269 - DNA, 827 bp, Clostridium innocuum
  ref <308>: DATABASE ACCESSION NUMBER: ATCC 14501
ttgagaacggagatttgccgcagctattgaccgctattgaaattcctctgaaagacagtgaatctctgattgtcgaagttgctcagcatatcggtgatgaacgtgtccgctgtatcgctatgggcggtacagatggtctggttcgtggaatggaagccattgatacaggatccgcaatccgtgtaccggtgggaaaagaaattctgggaagaatgttcaatgtcctcggacgtgaaattgatggtctgggacctgtaggaacggataacacactgccgatccacagacaggcaccgggctttgaggagcagcagacatccgcagaaatgctggaaacaggaattaaggtcattgacctgttatgtccatattccaagggtggtaagattggtttgtttggtggtgcgggagtaggtaaaaccgtactgattcaggagctgattcataatatcgccaaggaacatggtggaatgtccgtcgttaccggtgtaggggagagaacccgtgaaggaaacgacatgtatcatgaaatgaaggacagcggtgtccttgataagaccgtactggtttacggacagatgaatgaatcaccgggtgccagaatgcgtgtcggtctgaccgggctgacgatggcggaatatttccgtgatcacgaccatcaggatgtattgctgtttattgataatattttccgttttacccaggcgggaagtgaagtaagtgccctgctgggacgtatgccaagtgcagtaggctatcagccgacacttgcgacagaaatgggacagctgcaggagcgcattacatccacgaaggatggttccatt

SEQ ID NO: 270 - DNA, 829 bp, Clostridium perfringens
  ref <308>: DATABASE ACCESSION NUMBER: ATCC 13124
gcaaatgatgaacttcctaatatatttaatgcaatacacataaaaatggacgatggaaaaatcttagtttgtgaggtagagcaacacgtaggagacgatatagttagaactatagctatggaagctactgaaggactaagaagaggtgtagaagctgttgatacaggagcacctatatcagtaccagttggtgaatgcgtattaggaagaatatttaacgtattaggtaaaccactagatagtggagctgaagttaataacgaagaaaaatatccaattcatagaccagctccatcatttgaagaacaatcagttgttcctcaaatgtttgagacaggaataaaggttatcgaccttttagcaccttaccaaagagggggaaaaatcggtctatttggaggtgcaggtgttggtaaaacagttcttatccaagagcttataaacaacatagctaaagagcacggtggactttctgtattcacaggagttggagaaagatcaagagaaggtaatgacctttactatgaaatgatggaatcaggagttataaaaaatacagcattagtatttggacaaatgaacgaaccacctggagcaagaatgagagttgctttaacaggacttactatggctgagtacttcagagaccaaggtcaagacgtgttattattcatagataacatattcagattctcacaagctggatcagaggtttcagctttattaggaagaataccatcagctgttggttaccaaccaactcttgctacagagatgggagctcttcaagagagaatcacatcaactacccatggatcaattacatcag

SEQ ID NO: 271 - DNA, 22 bp, Artificial Sequence
  Synthetic DNA Sequence
ttgtccacgttggatrtcttca

SEQ ID NO: 272 - DNA, 818 bp, Corynebacterium diphtheriae
  ref <308>: DATABASE ACCESSION NUMBER: ATCC 27010
cccgcgtggcgagctgccggcactgtacaacgcgttgactgtcgaggtcaccctcgaggcagtcgctaagaccattacccttgaggttgcccagcacttgggcgacaacctcgttcgcgccgtgtccatggcccctaccgacggcctcgtccgtggtgctgttgtgaccgactcgggcaagccaatctccgtgccagttggcgacgttgttaaaggccacgttttcaacgcactgggcgattgcttggatgagccaggtctcggccgcgatggtgagcagtggggaattcaccgcgatccaccaccattcgatcagctcgaaggtaagaccgaaatcctcgagaccggtattaaggtcatcgacttgctcaccccttacgttaagggcggcaagattggtctgttcggtggtgcaggtgtgggtaagaccgtgctcatccaggagatgatcactcgtattgctcgcgagttctccggtacctccgtcttcgctggcgttggtgagcgtacccgtgagggcaccgacctcttcctcgaaatggaagaaatgggcgttcttcaggacaccgctctcgtgttcggccagatggacgagccaccaggagtccgtatgcgcgttgctctgtccggtctgaccatggcggagtacttccgcgatgttcagcaccaggacgtgcttctgttcatcgataacattttccgtttcacccaggccggttccgaggtttcgacccttcttggtcgtatgccttccgccgtgggttaccagccaaccttggctgacgagatgggtgttctccaggagcgtattacctcta

SEQ ID NO: 273 - DNA, 833 bp, Corynebacterium pseudodiphtheriticum
  ref <308>: DATABASE ACCESSION NUMBER: ATCC 10700
cgatgcctgctctgtacaacgcgctgactgtcgaggtcaccctcgaggcagtcgccaagaccatcacgcttgaggttgcacagcacctcggcgataacctgatccggaccattgcgttggcacctacggacggtctcgtccgtggcgctgaggttatcgacactggtaagccaattactgttcccgtcggcgatgccgtcaaaggacacgtcttcaatgcgctcggtgagtgtttggacgaaccaggattgggccgcgacggcgaacagtggggaatccaccgcgatccgccaccattcgatgcgctggagggcaaaaccgagattctggagactggaatcaaggttatcgacctccttaccccttacgttaagggtggcaaaattggtctgttcggtggcgccggcgtcggcaagaccgttcttatccaggaaatgatcactcgtatcgctcgtaacttctccggtacttccgtgttcgccggcgtcggtgagcgtacccgtgagggtactgacctgttcctggaaatggaagagatgggcgtgttgcaagacaccgcccttgtcttcggtcaaatggacgaaccaccaggggttcgtatgcgcgtggccttgtctggtctaaccatggctgaatatttccgcgacgttcaaaaccaggacgttttgttgttcattgacaacatcttccgttttactcaggcaggttccgaggtttccacgctgttgggccgtatgccttccgccgtgggttatcagccaacattggctgatgagatgggtgttttgcaggaacggattacctctacacgtggtaagtcaattacttccctg

SEQ ID NO: 274 - DNA, 417 bp, Corynebacterium ulcerans
  NCTC 8665
ccgtgctcatccaggagatgatcacccgtgtggcccgcaacttcggcggcacctctgtgttcgccggcgtcggcgagcgcacccgtgagggcaacgacctctgggtcgagatggacgaggccgacgtgctcaaggacaccgccctggtgttcggccagatggacgagccgccgggaacccgtctgcgcgtggccctgtccgcgctgaccatggcggagtacttccgcgatgtgcagaaccaggacgtgctgctgttcatcgacaacatcttccgcttctcccaggccggctccgaggtctccaccctgctgggccgcatgccctccgcggtgggctaccagccgaacctggcggacgagatgggtgtgctgcaggagcgcatcacctcgactcgcggccactccatcacctcgatgc

SEQ ID NO: 275 - DNA, 835 bp, Corynebacterium urealyticum
  ref <308>: DATABASE ACCESSION NUMBER: ATCC 43042
gggcagcagccagcactattcaacgcgctgcacgtcgaggttgacctcgaggcagttgcgaagaccattaccctggaggtcgcacagcacctgggtgacaacctggtgcgcaccgtctccatggccccgaccgacggcctggtccgcggtgcagaggtcaaggacaccggtaagccgatctctgtgccagtcggcgatgttgtcaaggggcacgtcttcaacgccctgggcgactgcctggatgagccaggtctcggccgcgacggcgagcagtggggcatccaccgcgagccaccggcattcgacgagctcgagggtaagaccgagatcctggagaccggcgttaaggtcatcgacctgctgaccccttacgtcaagggcggcaagattggcctcttcggtggtgcaggtgtgggtaagaccgtcctgattcaggagatgattacccgtatcgcccgcgagttctccggtacctccgtgttcgccggcgtcggcgagcgtacccgtgagggtacggacctcttcctcgagatggaggagatgggcgtgctccaggacaccgcgctggtgttcggtcagatggatgagccgccgggagtccgtatgcgcgtggctctgtccggtctgaccatggcggagtacttccgcgatgttcagggccaggacgtgctgctgttcatcgacaacatcttccgtttcacccaggcaggttctgaggtctccacgctgctcggccgcatgccgtccgcagtgggttaccagccgaccctggctgacgagatgggtgttctgcaggagcgcattacctccacgaagggtaagtccattacctccc

SEQ ID NO: 276 - DNA, 818 bp, Coxiella burnetii
  strain Nine Mile phase II
cccgtcacgctgtcccgaaagtgtacgatgctttgcaggtggatgaaaataatttaacgctcgaagtccaacagcaactcggggacggtgtcgtgcgcacaattgccatgggcagcactgagggcttaaaacgcgatatcgccgtaaaaaatacggaaaaaccgattgaagttcccgtaggaaaagaaactttaggtcgtatcatgaacgtgctgggtgagccgatcgatgagttaggtcccattaattcaaaagaaaaactccctattcatcgtcctgcgccgagctttattgagcaatctggcgctaccgaattattagaaaccggtattaaagtggtcgatttgctttgcccctttgctaagggaggcaaagtgggtctttttggaggcgcgggcgttggaaaaacggttaatatgatggaattaatccgtaatatcgccattgaacacagcggttattctgtttttgcgggtgtgggagaaagaacgcgagaaggcaatgatttttatcatgaaatgaaagaatccaatgtcttggataaagtggcgttggtgtacggacaaatgaacgagccgccagggaaccgcttgcgggtgggtttgacggggcttacgctggcggaagccttccgtgacgaaggacgcgacgttctgttatttatcgataatatctttcgttacactttggcaggggttgaagtctctgccctcctcggtcggatgccatcggctgtgggttatcagccgacgttggccgaagagatgggggccctgcaagaacgcattacttccactaaaaaagggtccattacgtcg

SEQ ID NO: 277 - DNA, 829 bp, Edwardsiella hoshinae
  ref <308>: DATABASE ACCESSION NUMBER: ATCC 33379
ttcccgcaggacgccgtgccgaaggtgtataacgcactggaagtaaaaggcggtgccacgaaactggtactggaagtgcagcagcagctgggtggcggcgtagttcgctgcatcgcgatgggctcttccgacggtctgcgccgtgggctagaggttgaagaccaagaccatccgatcgaggttcctgttggcaaggcgactctgggccgtatcatgaacgtactgggtgatccggtcgacatgaagggcgagatcggtgaagaagagcgttgggctatccatcgtgctgcaccgagctatgaagatctgtctaactctcaggaactgctggagaccggcattaaggttatcgacctgatttgcccgttcgctaaaggcggtaaagtgggcctgttcggtggggccggtgtgggtaagaccgttaacatgatggagcttatccgtaacatcgctatcgagcactccggttactcagtcttcgccggtgtgggtgagcgtacccgtgagggtaacgacttctaccacgagatgaccgattccaacgtattggataaagtttctctggtgtatggtcagatgaacgagccaccgggaaaccgtctgcgcgtggcgctgaccggtctgaccatggcggagaaattccgtgatgaaggtcgtgatgtactgttgttcatcgataacatctaccgttataccttggccggtactgaagtctccgctctgctgggccgtatgccgtcggcggtaggttatcagccgactctggcggaggaaatgggggtgctgcaagagcgtattacctccactaagaccgggtccatcacctctg

SEQ ID NO: 278 - DNA, 809 bp, Edwardsiella tarda
gccgtgccgaaggtgtataacgcactggaagtaaaaggcggtgccacgaaactggtactggaagtgcagcagcagctgggtggcggcgtcgttcgctgcatcgcgatgggctcctccgacggtctgcgccgtgggctggtggttgaagaccaagaccatccgatcgaggttccggtcggtaaggcgaccctgggccgtatcatgaacgtactgggtgatccggtcgacatgaagggcgagatcggcgaagaagagcgttgggctatccaccgcgcggcgccgagctatgaagatctgtccaactctcaggagctgctggagaccggcatcaaggttatcgacctgatttgcccgttcgccaaaggcggtaaagttggcctgttcggtggtgccggtgtgggtaagaccgttaacatgatggagcttatccgtaacatcgctatcgagcactccggttactccgtatttgccggtgtaggcgagcgtacccgtgagggtaacgacttctaccacgagatgaccgactccaacgtattggataaagtttctctggtatacggccagatgaatgagccgccgggaaaccgtctgcgtgtggcgttgaccggtctgaccatggcggagaaattccgtgatgaaggtcgcgatgtgttgttgttcatcgataacatttatcgttataccttggctggtaccgaagtttctgctctgctgggtcgtatgccgtcggcggtaggttatcagccgaccctggcggaagagatgggtgtgttgcaagagcgtatcacctcaacgaagacgggctctat

SEQ ID NO: 279 - DNA, 840 bp, Eikenella corrodens
  ref <308>: DATABASE ACCESSION NUMBER: ATCC 23834
tttccgcgtaccgccattccgcgtgtttacgatgcactcaaactggttgatactgatttgacgctggaagtacagcagcagcttggtgacggcgttgtccgtaccattgcgatgggtagtacagacggtttgaaacgtggcttggctgtgcaaaatactggtgcaccgattactgtgccggtggggaaagccaccctaggccgcatcatggacgttctgggcaaccccgtggacgaacaaggtccgatcggttctgaccaaacccgtgctattcatcaatttgcacctaagttcgacgaactctccagcactaccgaattgttggaaacaggcattaaagtgatcgatttgctttgtccgtttgctaaaggtggtaaagtgggtctgtttggcggtgccggtgtgggcaaaaccgtgaacatgatggagctgattaacaacattgccaaagcgcacagtggtctttccgtattcgccggtgtgggtgagcgtactcgtgaaggtaacgacttctaccacgaaatgaaagactccaacgtgttggataaagtggcaatggtgtatggccagatgaacgagccgcctggtaaccgcttgcgtgttgctctaactggtttgtcgatggctgaatacttccgtgacgaaaaagacgaaaacggcaaaggccgtgacgtattattctttgtggataatatctaccgctatactctggcgggtaccgaagtgtcggctctgcttggccgtatgccttctgctgtgggttatcagccaactttggctgaagaaatgggtcgtttgcaggagcgtattacctccacccaaactggttccattacctct

SEQ ID NO: 280 - DNA, 803 bp, Enterobacter agglomerans
  ref <308>: DATABASE ACCESSION NUMBER: ATCC 27989
gccgtaccacgagtgtacgatgcacttgaggtaaagaatggtgaagagcgtctggtgctggaagttcagcaacagctcggcggtggcgttgtacgtaccatcgcaatgggttcttctgatggtctgcgtcgtggtctggaagtaacggacctggctcacccgatcgaagtcccggtaggtaaagcaacactgggtcgtatcatgaacgtactgggcgaaccagtagacatgaaaggcgacatcggtgaagaagagcgttgggcgatccaccgtgcagcaccgtcctacgaagagttgtcaaactctcaggaactgctggaaaccggtatcaaagttatcgacctgatgtgtccgttcgctaagggcggtaaagtgggtctgttcggtggtgcgggtgtaggtaaaaccgtaaacatgatggagcttattcgtaacatcgcgatcgagcactccggttactctgtgtttgcgggcgtaggtgaacgtactcgtgagggtaacgacttctaccacgaaatgaccgactccaacgttatcgacaaagtatccctggtgtatggtcagatgaacgagccgccgggaaaccgtctgcgcgttgcgctgaccggtctgaccatggctgagaagttccgtgacgaaggtcgtgacgtactgttgttcgttgacaacatctaccgttacaccctggccggtacggaagtatccgcactgctgggccgtatgccttctgcggtaggttatcagccgacgctggcggaagagatgggcgttctgcaggaacgtatcacctccaccaaaaccgg

SEQ ID NO: 281 - DNA, 833 bp, Enterobacter amnigenus
  ref <308>: DATABASE ACCESSION NUMBER: ATCC 33072
cgaattccctcaggatgccgtaccgcgcgtgtacgatgctcttgaggtacagaatggtaacgagagtctggtgctggaagttcagcagcagctcggtggtggtatcgtacgtactatcgccatgggttcttccgacggtctgcgtcgtggtctggctgttaaagatctcgaacacccgatcgaagtcccggtaggtaaagcaacactgggtcgtatcatgaacgttttgggtcaaccaatcgacatgaaaggcgacatcggtgaagaagaccgttgggcaatccaccgtgcagcaccttcctatgaagagctgtctagctctcaggaactgctggaaaccggcatcaaagttatcgacctgatgtgtccgttcgctaagggcggtaaagttggtctgttcggcggtgcgggcgtgggtaaaactgtaaacatgatggagctgatccgtaacatcgcgatcgagcactccggttactccgtgtttgcaggcgtgggtgagcgtactcgtgagggtaacgacttctaccacgaaatgaccgattccaacgttctggataaagtatccctggtttatggccagatgaacgagccaccaggaaaccgtctgcgcgttgcgctgaccggtctgactatggctgagaagttccgtgacgaaggtcgtgacgtactgctgttcgtagataacatctaccgttacaccctggccggtactgaagtatctgcgctgctgggccgtatgccttcagcggtaggttaccagccgaccctggcggaagagatgggcgttctgcaggaacgtatcacttctaccaaaaccggttctatcacctccg

SEQ ID NO: 282 - DNA, 810 bp, Enterobacter asburiae
  ref <308>: DATABASE ACCESSION NUMBER: ATCC 35953
gccgtaccacgcgtgtacgacgcgcttgaggtacagaatggtaacgagagcctggtgctggaagttcagcagcagctcggcggcggtatcgtgcgtaccatcgcgatgggttcttccgacggtctgcgtcgtggtctggaagtcaaagaccttgagcacccgatcgaagtcccggtaggtaaagcaacactgggtcgtatcatgaacgtattgggtcaaccaatcgacatgaaaggcgacatcggtgaagaagagcgttgggctatccaccgcgcggcaccttcctacgaagagctgtccagctctcaggaactgctggaaaccggtatcaaagttatcgacctgatgtgtccgttcgcgaagggcggtaaagtcggtctgttcggtggtgcgggtgttggtaaaaccgtaaacatgatggagctgatccgtaacatcgcgatcgagcactccggttactccgtgtttgcgggcgtaggtgaacgtactcgtgagggtaacgacttctaccacgaaatgaccgactccaacgttctggacaaagtatccctggtttacggccagatgaacgagccaccaggaaaccgtctgcgcgttgcgctgaccggtctgacgatggctgagaagttccgtgatgaaggccgtgacgttctgctgttcgttgataacatctatcgttacaccctggccggtacggaagtatctgcactgctgggtcgtatgccttcagcggtaggttaccagcctacgctggcggaagagatgggtgttcttcaggaacgtatcacctctaccaaaaccggttctatc

SEQ ID NO: 283 - DNA, 811 bp, Enterobacter cancerogenus
  ref <308>: DATABASE ACCESSION NUMBER: ATCC 35317
gccgtaccgcgcgtgtacgatgctcttgaggtacagaatggtaacgagagcctggtgctggaagttcagcagcagctcggcggcggtatcgtacgtactatcgccatgggttcttccgacggtctgcgtcgtggtctggaagtaaaagaccttgagcacccgatcgaagtcccggtaggtaaagcaacactgggtcgtatcatgaacgtattgggtcaaccaatcgacatgaaaggcgacatcggtgaagaagagcgttgggctatccaccgcgcagcaccttcctacgaagagctgtccagctctcaggaactgctggaaaccggcatcaaagttatcgacctgatgtgtccgttcgcgaagggcggtaaagtcggtctgttcggtggtgcgggtgtaggtaaaaccgtaaacatgatggagctgatccgtaacatcgcgatcgagcactccggttattccgtgtttgcgggcgtgggtgaacgtactcgtgagggtaacgacttctaccacgaaatgaccgactccaacgttctggataaagtatccctggtgtacggccagatgaacgagccaccaggaaaccgtctgcgcgttgcgctgaccggcctgaccatggctgagaagttccgtgacgaaggtcgtgacgtactgctgttcgttgataacatctaccgttacaccctggccggtaccgaagtatctgcactgctgggtcgtatgccttcagcggtaggttatcagcctacgctggcggaagagatgggtgttcttcaggaacgtatcacctcaaccaaaaccggttctatca

SEQ ID NO: 284 - DNA, 817 bp, Enterobacter cloacae
  ref <308>: DATABASE ACCESSION NUMBER: ATCC 13047
gccgtaccacgcgtgtacgacgcgcttgaggtacagaatggtaacgagagcctggtgctggaagttcagcagcagctcggcggcggtatcgtgcgtaccatcgcgatggggtcttccgacggtctgcgtcgtggtctggaagttaaagaccttgagcacccgatcgaagtcccggtaggtaaagcaacactgggtcgtatcatgaacgtattgggtcagccaatcgacatgaaaggcgacatcggtgaagaagagcgttgggctatccaccgcgcggcaccttcctacgaagagctgtccagctctcaggaactgctggaaaccggtatcaaagttatcgacctgatgtgtccgtttgcgaagggcggtaaagttggtctgttcggtggtgcgggtgtaggtaaaaccgtaaacatgatggagctgatccgtaacatcgcgatcgagcactccggttactccgtatttgcgggcgtaggtgaacgtactcgtgagggtaacgacttctaccacgaaatgaccgactccaacgttctggacaaagtatccctggtttacggccagatgaacgagccaccaggaaaccgtctgcgcgttgcgctgactggtctgacgatggctgagaagttccgtgacgaaggccgtgacgttctgctgttcgttgataacatctaccgttacaccctggccggtacggaagtatctgcactgctgggtcgtatgccttcagcggtaggttatcagcctacgctggcggaagagatgggtgttcttcaggaacgtatcacctctaccaaaaccggttctatcacttccg

SEQ ID NO: 285 - DNA, 766 bp, Enterobacter gergoviae
  ref <308>: DATABASE ACCESSION NUMBER: ATCC 33028
aatgagagcctggtgctggaagttcagcagcagctcggcggcggtatcgtgcgtaccatcgcaatgggttcttctgacggtctgcgtcgcggtctggaagttaaagatctcgaacatccgatcgaagtcccggtaggtaaagcgaccctcggccgtattatgaacgtgctgggtcagccggttgatatgaaaggcgatatcggcgaagaagagcgttgggcgatccaccgcgctgcgccgtcctatgaagagctctccagctctcaggaactgctggaaaccggtatcaaggtaatggacctgatttgcccgttcgcgaagggcggtaaagtcggtctgttcggcggtgcgggcgttggtaaaaccgtaaacatgatggagctgatccgtaacatcgcgatcgagcactccggctactccgtgtttgcgggcgtgggtgaacgtactcgtgagggtaacgacttctaccacgaaatgaccgactccaacgttatcgacaaagtatccctggtgtacggccagatgaacgagccgccgggaaaccgtctgcgcgtggcgctgaccggtctgaccatggctgagaaattccgtgacgaaggtcgtgacgttctgctgttcgtcgataacatctaccgctataccctcgccggtactgaagtatccgcactgctgggccgtatgccttctgcagtaggttaccagccgacgctggcggaagagatgggtgttctgcaggaacgtatcacctccaccaaaaccggttcta

SEQ ID NO: 286 - DNA, 805 bp, Enterobacter hormaechei
  ref <308>: DATABASE ACCESSION NUMBER: ATCC 49162
gccgtaccacgcgtgtacgacgcgcttgaggtacagaatggtaacgagagcctggtgctggaagttcagcagcagctcggcggcggtatcgtgcgtaccatcgccatgggttcttccgacggtctgcgtcgtggtctggaagtgaaagaccttgagcacccgatcgaagtcccggtaggtaaagcaacgctgggtcgtatcatgaacgtattgggtcagccaatcgacatgaaaggcgacatcggtgaagaagagcgttgggctatccaccgcgcggcaccttcctacgaagagctgtccagctctcaggaactgctggaaaccggcatcaaagttatcgacctgatgtgtccgtttgcgaagggcggtaaagttggtctgttcggtggtgcgggtgtaggtaaaaccgtaaacatgatggagctgatccgtaacatcgcgatcgagcactccggttactccgtgtttgcgggcgtgggtgaacgtactcgtgagggtaacgacttctaccacgaaatgaccgactccaacgttctggacaaagtatccctggtttacggccagatgaacgagccaccaggaaaccgtctgcgcgttgcgctgactggcctgacgatggctgagaagttccgtgacgaaggccgtgacgttctgctgttcgtcgataacatctaccgttacaccctggccggtacggaagtatctgcactgctgggtcgtatgccttcagcggtaggttatcagccaacgcttgcggaagagatgggtgttcttcaggaacgtatcacctcgaccaaaaccggtt

SEQ ID NO: 287 - DNA, 791 bp, Enterobacter sakazakii
  ref <308>: DATABASE ACCESSION NUMBER: ATCC 29544
tacgacgcccttgaggtaacgaatggtaatgagcgtctggtgctggaagtccagcagcagctcggcggcggtatcgtacgtaccatcgcgatgggctcttccgacggtctgcgtcgcggtctgcctgttgcagaccttgagcacccgatcgaagtgccggtaggtaaagcgacgctgggtcgtatcatgaacgtcctgggtcagcctatcgacatgaaaggcgacatcggcgaagaagagcgttgggcgattcatcgcgcggcgccgtcctatgaagagctgtccagctctcaggaactgctggaaaccggcatcaaagttatcgacctgatgtgtccgttcgcgaagggcggtaaagtcggtctgttcggtggtgcaggtgtaggtaaaaccgtaaacatgatggagcttattcgtaacatcgcgattgagcactccggttactccgtgtttgcgggcgtgggcgaacgtacccgtgaaggtaacgacttctaccacgaaatgaccgactccaacgtactggataaagtatccctggtgtacggccagatgaacgagccgccgggaaaccgtctgcgcgttgcgctgaccggcctgaccatggctgagaaattccgtgacgaaggtcgtgacgttctgctgttcgtcgacaacatctaccgttacaccctggccggtactgaagtatccgcactgctgggccgtatgccttcagcggtaggttatcagccgaccctggcggaagagatgggtgttctgcaggagcgtatcacctccaccaaaaccggttc

SEQ ID NO: 288 - DNA, 839 bp, Enterococcus avium
  ref <308>: DATABASE ACCESSION NUMBER: ATCC 14025
tttctttagatcaatccttaccagacatcaacaatgcgttgattgtttacaaaaaagataaaacaaaagttgttcttgaagttgctttggaacttggtgatggtgttatccgcacaatcgctatggaggctactgatggattgcaacgtggaatggaagttgtcgatactggcaaatcaatctccgttcctgtaggtaaagatactctaggtcgtgtgtttaacgtattaggtgaaacgattgataaagaagcaccttttccagaagatgcagaaagaagcggcattcataaaaaggcgcctgcttttgaagaccttagtacaagtaacgagattttggaaacagggatcaaggttatcgacttattagccccttatttaaaaggtgggaaagtcggactattcggtggtgccggtgttggtaaaaccgttttgatccaagaattaattcataatatcgcccaagaacacggtggtatttcagtgtttaccggtgttggggaacgtactcgtgaagggaacgacctttattatgaaatgaaagactctggcgttattgagaaaacagccatggtgttcggacaaatgaacgagccgcctggtgcacgtatgcgtgttgccttgactggtttgacattagctgaatatttccgtgatgaagaaggacaagatgtgttgctatttattgacaacatcttccgctttactcaagccggatcagaagtttctgccttattaggacgtatgccatcagccgttgggtatcaaccaactttggcaactgaaatggggcaattacaagaacgaatcacttcaaccaaaaaaggttcgatcacttca

SEQ ID NO: 289 - DNA, 847 bp, Enterococcus casseliflavus
  ref <308>: DATABASE ACCESSION NUMBER: ATCC 25788
ttctctctagaccaatcattaccagatatcaacaatgcgttgattgtttacaaaaaagatgagcagaaaacaaaagttgtgttagaagctgccttagaacttggcgacggcgttatccgtacgattgccatggaatcaacagatggcttacaacgaggaatggaagtaatcgatacaggcgcctccatttctgttccagttgggacagaaaccttaggacgggtgtttaatgtcttaggggacaccatcgatttagaagcgccgttccctgaagaagcaccccgcagtgggattcacaaaaaagcacctgactttgatgaattgtcaacaagtacggagatccttgaaactgggatcaaagttatcgatttgttagccccttatttaaaaggggggaaagttggacttttcggtggtgccggtgttggtaaaaccgtcttgatccaagaattgatccacaacatcgcccaagagcatggtgggatctctgtcttcacaggtgttggtgaacggacacgtgaaggaaatgacctttataatgaaatgaaagaatctggcgttatcgaaaaaacagccatggtgtttggacaaatgaacgaaccaccaggtgctcggatgcgggtagccttgactggtttgacattagccgagtacttccgtgatgtggaaggacaagacgtgctcttgtttatcgataatatcttccgcttcactcaagcaggttctgaagtatctgccttactaggtcggatgccgtctgccgttgggtatcagccaacattagcaactgagatggggcaattacaagaacggatcacatcgacgaagaaaggttccgttacgtcta

SEQ ID NO: 290 - DNA, 845 bp, Enterococcus durans
  ref <308>: DATABASE ACCESSION NUMBER: ATCC 19432
tttctttagaccaatccttaccagatatcaacaacgctttagttgtttataaaaatgatgagaagaaatcgaaagttgttcttgaaacagcgctagaattaggtgacggtgtcatccgtacaatcgcgatggaatcaacagatggtttacaacgcggaatggaagtcattgatacagaaaaagcaatttctgtaccagtgggtaaagaaacgttaggtcgtgtattcaatgtattaggagatacgatcgatttatctgcacctttcccagaagatgcaaaacgtagcgaaatccataaaaaagcaccaaactttgatgagttaagtacaagtactgagatccttgaaactgggatcaaagttattgacttgcttgctccttacttaaaaggtgggaaagttggattattcggtggtgccggtgtaggtaaaactgtattgatccaagaattgatccataatatcgctcaagaacacggtggtatttctgtatttactggtgttggtgaacgtacacgtgaaggtaatgacctttattatgaaatgaaagattcaggagttattgaaaaaacagccatggtgtttggtcaaatgaacgaaccaccaggtgcacgtatgcgtgttgccttgactggtttgacgattgctgaatacttccgtgatgttgaagggcaagacgtgctattgtttattgataatattttccgtttcactcaagccggttcagaagtttctgccctattaggtcgtatgccttctgccgttgggtaccaaccaacgctagcaacagaaatgggtcaattacaagaacggatcacttcaacgaaaaaaggttcaatcacttca

SEQ ID NO: 291 - DNA, 840 bp, Enterococcus faecalis
  ref <308>: DATABASE ACCESSION NUMBER: ATCC 29212
ttagatcaatccttacccgatattaacaacgctttagtcgtttataaaaatggcgaagcaaaacaaaaagtagtacttgaagtcgctttagaactaggtgatggagtgattcgttctatcgccatggaatcgacagatggtttacaacgtggaatggaagttatcgatacaggaaaatcaatttcagttcctgttggtaaagatacattaggtcgtgtgtttaacgttttaggagacacaattgacttagaagcgccattccctgcagatgctgaacgtagtgggattcataaaaaagcgccagcatttgatgaattaagtaccagtaatgaaattttagaaacagggattaaagttattgacttattagcaccttatctaaaaggtggtaaagtcggacttttcggtggtgccggtgttggtaaaaccgtcttaattcaagaattaattcataatattgcccaagaacatggagggatttccgtctttactggtgttggtgaacggacacgtgaagggaacgatctgtactatgaaatgaaagattcaggcgttattgaaaaaacagccatggtttttggtcaaatgaacgaaccgccaggtgcacggatgcgtgtggccttaactgggttaacgattgctgaatatttccgtgatgtggaaggacaagacgtgctattatttattgataacattttccgtttcacccaagccggttcagaagtttctgcccttttaggtcggatgccgtcagccgttggttaccaaccaaccttagcgactgaaatgggacaattacaagaacggattacttcaacgaaaaaaggatcaattacctct

SEQ ID NO: 292 - DNA, 831 bp, Enterococcus faecium
  ref <308>: DATABASE ACCESSION NUMBER: ATCC 19434
tttctttagaccaatccttaccagatatcaacaacgcattagttgtttataaaaatgacgaaaataaatcaaaagttgttcttgaagcagcgttagaattaggggacggagtgatccggaccattgcgatggaatcaacagatggtttacaaagaggaatggaagtcattgatacaggcaaagcaatctctgttcctgtaggtaaagaaacattaggtcgcgtattcaacgtactaggagatacgatcgatttagaaacacctttcccagaagatgcggaaagaagcgaaattcataaaaaagcaccagcctttgacgaattaagtacaagtacagaaattttggaaacagggatcaaagttatcgatttgcttgccccatatttaaaaggtgggaaagtcggactattcggtggtgccggtgttggtaaaaccgtactgatccaagaactgatccataatatcgcccaagaacatggtggtatttctgtatttaccggtgtaggtgaacgtactcgtgaaggtaatgacttgtattatgaaatgaaagattcaggagttatcgaaaaaacagccatggtgttcggacaaatgaacgaaccaccaggtgcacgtatgcgtgttgctttgactggtttgacgattgcggaatatttccgtgatgtagaaggtcaagatgtactgttgtttatcgacaacattttccgtttcactcaagctggatctgaagtatcagccttgttaggacggatgccttctgcggttggttatcaaccaacattggcaacagaaatgggtcaattgcaagaacgtatcacatctacgaaaaaag

SEQ ID NO: 293 - DNA, 826 bp, Enterococcus gallinarum
  ref <308>: DATABASE ACCESSION NUMBER: ATCC 49573
ccttaccagatatcaacaatgcgttgatcgtttacaaaaaagacgagaaaaaaacaaaagtagtattggaagccgctttagaactaggggatggtgtgatccgcaccatcgcaatggaatctacagacggtttgcaacgaggaatggaagtcatcgataccggtgcctcaatctctgtccctgtaggaacagatactctaggccgagtatttaatgtactaggcgatactatcgacttggaagcaccattcccagaagatgccaaacgtagtggcatccacaaaaaagccccagatttcgatgaattgtcaacaagtacagaaatccttgaaactgggatcaaagttatcgatttattagctccttacttaaaaggtggtaaagtcggcttgttcggtggtgccggtgttggtaaaaccgtattgattcaagaattgattcacaatatcgctcaagagcatgggggaatttcagtatttaccggtgttggcgaacggacgcgtgaaggtaatgacttgtattatgaaatgaaagaatcaggcgttatcgaaaagacagccatggttttcggtcaaatgaatgaaccaccaggtgcccggatgcgggttgctttgactggtttgaccattgctgagtatttccgtgacgttgaaggacaagatgtgctcttgtttatcgataatattttccgtttcacacaagcgggttctgaagtatctgccttgttaggccggatgccatcagccgttggttatcaaccaactctagcaactgaaatgggtcaattacaagaacgaatcacttctacgaaaaaaggatctgtaac

SEQ ID NO: 294 - DNA, 846 bp, Enterococcus saccharolyticus
  ref <308>: DATABASE ACCESSION NUMBER: ATCC 43076
tttctttggaccaatccttaccagacatcaacaatgcgttggtggtctataaaaagaatgatgaaaaaacaaaagtggtacttgaaacagctttagaacttggtgatggtgtcgtacgtacgattgctatgtcgtcaacagacggtttgcaacgtgggatggaagtcatcgatacaggagcatcaatttctgttcctgttgggaaagagacattaggacgtgtatttaacgttttaggggagactatcgacttagatggtccattcccagaagaagtagcacgagatggtattcataaaaaggcacctgattttgatgaattaagtacaagtacggagattcttgaaacagggattaaagtaatcgatttattagcgccttacttaaaaggtgggaaagttggtttattcggtggtgccggtgtaggtaaaacggtattaattcaagaattgattaacaatattgcgcaagaacatggtggtatttcagtatttgcgggtgttggtgagcgtactcgtgaaggaaatgacctttattatgaaatgaaagagtcgggcgttattgagaaaacagcgatggtttttggacaaatgaacgaaccaccaggtgcacgtatgcgagttgctttaactggtttaaccattgcagaatacttccgtgatgttgaaggacaagatgtattactatttattgataacattttccgttttactcaagctggttcagaagtttcagctttattaggacgtatgccttcagcggtagggtatcaaccgacattagcaacagaaatgggacaattacaagaacgtattacgtcaacgaaaaaaggctcaattacatcaa

SEQ ID NO: 295 - DNA, 803 bp, Escherichia fergusonii
  ref <308>: DATABASE ACCESSION NUMBER: ATCC 35469
gccgtaccgcgcgtgtacgatgctcttgaggtgcaaaatggtaatgagcgtctggtgctggaagttcagcagcagctcggcggtggtatcgtgcgtaccatcgcaatggggtcctccgacggtctgcgtcgcggtctggatgtaaaagacctcgaacacccgatcgaagtcccggtaggtaaagcgactctgggccgtatcatgaacgtactgggtgaaccggtcgacatgaaaggcgagatcggtgaagaagagcgttgggcgattcaccgcgcagcaccttcctacgaagagctgtcaaactctcaggaactgctggaaaccggtatcaaagttatcgacctgatgtgtccgttcgctaagggcggtaaagtcggtctgttcggtggtgcgggtgtaggtaaaactgtaaacatgatggagcttattcgtaacatcgcgatcgagcactccggttactctgtgtttgcgggcgtaggtgaacgtactcgtgagggtaacgacttctaccacgaaatgactgactccaacgttatcgacaaagtatccctggtatatggccagatgaacgagccgccgggaaaccgtctgcgcgttgcactgaccggcctgaccatggctgagaaattccgtgacgaaggtcgtgacgttctgctgttcgttgacaacatctatcgttacaccctggccggtacggaagtatccgcactgctgggccgtatgccttcagcggtaggttatcagccgactctggcggaagagatgggcgttcttcaggaacgtatcacctccaccaaaactgg

SEQ ID NO: 296 - DNA, 822 bp, Escherichia hermannii
  ref <308>: DATABASE ACCESSION NUMBER: ATCC 33650
gatgccgtaccgcgcgtgtacgatgctcttgaggtgcaaaatggtgatgagcgtctggtgctggaagtgcagcagcagctcggcggcggtatcgtgcgtaccatcgcaatgggttcttccgacggtctgcgtcgtggtctgactgtcgtcgacctcgagcacccgatcgaagtcccggtaggtaaagcgaccctgggccgtatcatgaacgtgctgggtcagccgatcgacatgaaaggcgatatcggtgaagaagagcgttgggcgattcaccgcgcggcgccgtcctatgaagagctgtccagctctcaggaactgctggaaaccggcatcaaagttatcgacctgatgtgtccgttcgcgaagggcggtaaagtcggtctgttcggtggtgcgggcgtaggtaaaaccgtaaacatgatggagctgatccgtaacatcgcgatcgagcactccggttactctgtgtttgcgggcgtgggtgaacgtactcgtgagggtaacgacttctaccatgaaatgaccgactccaacgttctggacaaagtatccctggtttacggccagatgaacgaaccgccgggaaaccgtctgcgcgttgcactgaccggcctgaccatggctgagaaattccgtgacgaaggtcgtgacgttctgttgttcgtcgacaacatctaccgttacaccctggccggtactgaagtatccgcactgctgggccgtatgccttctgcggtaggttaccagccgaccctggcggaagagatgggcgttctgcaggagcgtatcacctccaccaaaaccggttctatcacctccgta

SEQ ID NO: 297 - DNA, 808 bp, Escherichia vulneris
  ref <308>: DATABASE ACCESSION NUMBER: ATCC 33821
ccgaacgtgtacgacgccctcgaagtgacaaatggtaatgagcgtctggtgctggaagttcagcagcagctcggcggcggtatcgtacgtaccatcgctatgggttcttccgacggtctgcgtcgtggtctggaagttcaggacctcgagcacccgatcgaagtgccggtaggtaaagcgaccctgggtcgtatcatgaacgtactgggtcagccgatcgatatgaaaggcgacatcggtgaagaagagcgttgggctattcaccgtgcagcaccgtcctatgaagagctctccagctctcaggaactgctggaaaccggcatcaaggttatcgacctgatgtgtccgttcgccaagggcggtaaagtcggcctgttcggcggcgcgggcgtgggtaaaaccgtaaacatgatggagctgatccgtaacatcgcgatcgagcactccggttactccgtgtttgcaggcgtgggtgagcgtactcgtgagggtaacgacttctaccacgagatgaccgactccaacgttctggacaaagtatccctggtgtacggccagatgaacgagccgccgggaaaccgtctgcgcgtggcactgaccggcctgaccatggctgagaagttccgtgacgaaggtcgtgacgttctgctgttcgttgacaacatctatcgttacaccctggccggtacggaagtatctgcactgctgggccgtatgccttcagcggtaggttaccagccgacgctggcggaagagatgggcgttctgcaggagcgtatcacctccaccaaaaccggttctatcacct

SEQ ID NO: 298 - DNA, 843 bp, Eubacterium lentum
  ref <308>: DATABASE ACCESSION NUMBER: ATCC 43055
tttccccctgatcagctgccggcgatttacaacgcgctgacggttgatgccaagaccctggcgggcgacttgcacctcgtgctcgaggtcgagacgcacctgccgggcaaccttgtccgctcggtggccatgagctcgacggacggtctcgtccgcggcctcgaggtcgtcgacacgggcaacccgatcatgatgcccgtgggtcccgagaccctgggtcgcatctggaacgtcatgggcgagcccgtcgacgagaagccgatgcccgaggtgaagggctacatgcccatccaccgtccggctccggactacgacgagctgtccaccaccaccgagatcttcgagaccggcatcaaggccatcgacctcgtcgagcccttcgtcaagggcggcaagacgggtctgttcggcggcgccggcgtgggcaagacggttatcatccaggagctcatcaacaacctggcccaggagcacggcggcacgtcggtgttcacgggcgtgggcgagcgtacccgcgagggtaccgacctctacctggagatgagcgactcgggcgtcatcaacaagacctgcctcgtgtacggtcagatgaacgagcctccgggagcgcgtctgcgcgtgggtctcgcgggcctcaccgaggcggagtacttccgcgatcagggccaggacgtgcttctgttcgtggacaacatcttccgcttcacgcaggccggctccgaggtgtccgctctgctgggccgcatgccctctgccgtgggttaccagccgacgctggcaaccgagatgggcgacctgcaggagcgcatcacgtcgacgtccaccggctccatcacgtccgtg

SEQ ID NO: 299 - DNA, 829 bp, Ewingella americana
  ref <308>: DATABASE ACCESSION NUMBER: ATCC 33852
tccctcaggatgcagtaccgaacgtgtacaatgctcttgaggtagaaaacggtgcctccaaactggttctggaagttcagcaacagttaggcggcggcgttgttcgttgtatcgcaatgggtacctcagacggccttcgtcgcggtctgaaagtgaacaacctggaacacccaattgaagttccggttggtaaagcgactctgggtcgtatcatgaacgtattgggtgaaccaatcgacatgaaaggtgaaatcggcgaagaagaacgtcgtgcaattcaccgtccagcgccttcttatgaagagctggctaactcccaagaattgctggaaaccggtatcaaagttatggacctgatgtgtccgttcgctaagggcggtaaagtcggtctgttcggtggtgcgggtgttggtaaaactgtaaacatgatggagctgatccgtaacatcgcgatcgagcactccggttactcagtgtttgcaggcgtgggtgagcgtactcgtgagggtaacgacttctaccacgaaatgactgactccaacgttatcgacaaagtttccctggtctatggtcagatgaatgagccaccaggtaaccgtctgcgcgttgcactgaccggcctgaccatggcggagaaattccgtgatgaaggtcgtgacgtactgctgttcgttgacaacatttaccgttacaccctggcaggtaccgaagtgtccgcacttctgggccgtatgccatcggcggtaggttatcagccaacgctggcggaagagatgggtgctctgcaagagcgtatcacctctaccaaaagtggttctatcacctccgt

SEQ ID NO: 300 - DNA, 805 bp, Francisella tularensis
  strain LVS
aacacgcctaaagtatatgatgctttaaatgtagtagaagctggtttagtattagaagttcagcaacaaattggtgatggcgtagttcgtacaattgctatgggatctagtgatggtcttagacgtggtatggaagttaagaacacaaatgcgcctatttctgttccagttggacatggcacacttggacgtatcatgaatgttttaggtgaaccaattgatgaagctggtccaattgaatatactgagaaaagatctatccatcaagctcctcctgcatatgatgagttagcattaagtacagaaatattagaaacaggtatcaaagtagttgaccttatttgtccatttgctaagggcggtaaagttggtttatttggcggtgcaggtgttggtaaaactgtaacgatgatggaacttatcaacaatattgcaaaagaacatagtggctactctgtattttccggtgttggtgaaagaactcgtgaaggtaatgacttctactatgagatgaaatattctaatgtattggataaagtatcattagtatatggtcagatgaatgagccgcctggaaacagattaagagtagctcttagtggcttaacaatagcagaaggattccgtgatgaaaagcgtgatgttttgatgtttatcgataacatctatcgttatacattagcaggtacagaggtatcggcgctacttggtcgtatgccatctgctgtgggttatcagccaacgcttgcagctgagatgggtgctttacaggagcgtattacatctactaagacaggatctatta

SEQ ID NO: 301 - DNA, 825 bp, Fusobacterium gonidiaformans
  ref <308>: DATABASE ACCESSION NUMBER: ATCC 25563
gacgaattgccaaaaatatacaatgcattaaaggtgcaagttggagaaaaagaacttgtattggaagtgcaacaacatttgggaaataatgttgtgagaacagtagcgatggactcaacagatggattgcttcgaggaatggaagtaatggataccggagcaccgattactgttccagtagggaaggcggttttaggaagaatattgaatgttttgggagagcctgtggatcaaaaagggcctgtggaaacagaagaatatttacctatccatagagaagcaccaaaatttgaagaacaagaaacagtaacagaaatttttgaaacaggaattaaagtcatagatttgttagccccttatatcaaaggaggaaagacaggtctattcggtggagccggagtagggaaaacagttttaattatggaattaattaataacattgcaaagggccacggaggaatttctgtgtttgcaggagttggagaaagaacaagagaaggaagagatttatacaacgaaatgacagagtccggagttttgaataagacctcgttggtgtatggtcaaatgaatgagccgcccggagcaagacttcgtgtggcgttgacaggattaacggttgctgaaaactttagagataaagaagggcaagatgtattgttgtttatcgacaatatcttccgtttcacacaagcaggatcagaagtatcggctctattgggaagaattccatcggcagtaggatatcaaccgaacttagcgacagaaatgggaactttacaagaaagaattacttctacaaaatcaggatctatcacttcggta

SEQ ID NO: 302 - DNA, 806 bp, Fusobacterium necrophorum subsp. necrophorum
  ref <308>: DATABASE ACCESSION NUMBER: ATCC 25286
acaatgcattaaaggtacaggtgggagaaagggaacttgtgttggaagtgcagcaacatttaggaaataatgttgtcagaacagtagcaatggattcaacagacggattacttcggggaatggaagtgagagatacaggagttcccattactgttccggtaggaaaggcggttttgggaagaatattaaatgtcttaggggagcctgtggacgaaaaaggtccgatagagacagaagaatatttaccaatacatagagaagcaccgaaatttgaagaacaggaaacggtgacagaaatttttgaaacaggaattaaagtcattgatttgttagctccttatattaaaggaggaaaaacaggcctattcggaggagccggagtaggaaaaaccgttttgattatggaactgatcaataatattgcaaaaggtcatggaggaatttctgtttttgcaggagttggagaaagaacgagagagggaagagatctatacaacgaaatgacagagtccggagttttgaataaaacttctttggtatatgggcaaatgaatgagccgcccggagcaagacttcgagtggctttaaccggacttactgttgccgaaaatttcagagataaagagggacaggatgtcttattgttcattgacaatattttccgtttcacacaagcaggttcggaagtatcggcacttttggggagaattccttctgcagtgggatatcaaccgaacttggcgacagaaatgggaagcttacaagaaagaattacttctacaaaatccggttctatcacttccgtg

SEQ ID NO: 303 - DNA, 821 bp, Fusobacterium nucleatum subsp. polymorphum
  ref <308>: DATABASE ACCESSION NUMBER: ATCC 10953
gatgaattgcctgcaatatataatgctttaaaagtaaaattagaagataaggaacttgttctagaagttgaacaacatcttggtaacaatgttgtaagaactgttgctatggattcaactgatggattaaaaagaggaatggaagttatagatacaggtaaaccaattacagtaccagttggtaaagctgttcttggtagaatattaaatgttttaggagaacctgttgataatcaaggtcctataaatgctgaaacatttttacctattcatagagaagcaccagaatttgatgacttagaaactgaaactgaaatatttgaaacaggaataaaagttatagacttattagcaccatatattaaaggtggaaaaataggattatttggtggagctggagtaggaaaaacagttttaataatggaacttatcaacaacattgcaaaaggacatggaggaatttcagtttttgcaggagttggagaaagaacaagagaaggtagagacttatatggtgaaatgactgaatcaggagttatcacaaaaacagctcttgtttatggacaaatgaatgagccacctggagcaagacttagagttgcattaacagggcttactgttgcagaaaactttagagataaagatgggcaagatgttcttctatttatagataatatatttagatttacacaagcaggttcagaagtttcagctttacttggaagaataccatcagctgttggatatcaaccaaacctagcaactgaaatgggtgctttacaagaaagaataacatctacaaaatctggttcaattacatc

SEQ ID NO: 304 - DNA, 864 bp, Gardnerella vaginalis
  ref <308>: DATABASE ACCESSION NUMBER: ATCC 49145
ttcccagttggctatcttccagatatttataatgctctcaaggttgatatcaacaccgttggaaacacggagggagataccgtccacgagattacattggaagttgagcagcaccttggtgattcaactgtgcgagcagtggcacttaagcctacggacggcttggtccgtggtgctttagtgcgagatactggtggcccaatttctgtgcctgttggagatgttacaaaaggtcacgtttttgacgtaactggtaacattttaaacgctaaaccaggcgaaaacattgaggtgaccgagcgctggccaatccaccgcaacccacctgctttcgatcagcttgagtctaagactcaaatgtttgaaacaggcattaaggttatcgatttgcttacgccttacgttcagggcggaaagattggtctgttcggtggtgcaggcgttggtaaaactgtgttgattcaggagatgattcagcgcgttgcacagaaccacggcggtgtgtctgtgtttgctggcgttggcgaacgtactcgtgagggtaacgatttgattggcgaaatggctgaggctggcgttttggagaaaacagcgcttgtctttggtcagatggatgagcctcctgggactcgtcttcgtgtgcctcttactgctttgactatggctgagtatttccgtgatgttcagaatcaggatgtgttgctgtttatcgacaacatcttccgctttactcaggcaggttctgaggtttccacgttgcttggtcgtatgccttctgcagttggttatcagccaaacttggcggatgaaatgggtgcgttgcaggagcgcattacttctacgcgcggtcattctattacgtcg

SEQ ID NO: 305 - DNA, 848 bp, Gemella haemolysans
  ref <308>: DATABASE ACCESSION NUMBER: ATCC 10379
tcgaatcagggcatatgccaaatctattaaacgctttagaagtttacatagaaaaaggcgatgggaaaaaagaaaaattagttcttgaagtttctcttgaaattggtgataacgtagtaagaacaatcgctatgtcatctactgatggattaaataggggagcagaagtagtagatacaggagcaccaattacagttcctgtaggtaactacacattaggtcgtgtgttcaacgtattaggtgaagcagttgaccacggtgaagaagcaggagcagaagttcgtaaagattcaattcacaaagaagctccaacattcgatgaattatcaactcacgttgaggttcttgaaacaggtattaaagttatcgacttacttgcaccatatattaaaggtggtaaaatcggtcttttcggtggtgcgggagttggtaaaacggttcttatccaagaacttatcaacaacgttgcgcaacaacacggtggattatcagtattcacaggtgtaggtgagcgtactcgtgaaggaaatgacttatactatgaaatgaaagattctggtgttattaacaaaacagccatggtattcggacaaatgaacgaaccaccaggtgctcgtatgcgtgtagcattaacaggattaacaatggcggaatacttccgtgatgaagaaggacaagacgtgcttctattcatcgataacattttccgtttcacacaagcaggttctgaggtttctgcgttattaggacgtatgccatcagccgttggttaccaaccaacacttgctacagagatgggacgtttacaagaacgtataacatcaactaaaaaaggttctgttacatct

SEQ ID NO: 306 - DNA, 848 bp, Gemella morbillorum
  ref <308>: DATABASE ACCESSION NUMBER: ATCC 27824
tcgaatcagggcatatgcctaatctactaaacgctttagaagtttatatagaaaaaggcgatggaaaaaaagaaaaattagttcttgaagtttctcttgaaatcggggataatgtcgtaagaactattgcgatgtcatctactgatggattaaacagaggggcagaagtagttgatactggagcgccaattacagtgccagtaggtaactatacattaggacgtgtgttcaacgtattaggtgaagcagttgaccacggagaagaagctggagcagaagttcaaaaagaatctattcataaagaagctccaactttcgaagaattatcaacacatgttgaggtattagaaacaggtattaaagttatcgaccttcttgcaccatatattaaaggtggtaagattggactattcggtggtgctggagttgggaaaacagttcttatccaagaacttattaacaacgtagcacaacaacacggaggactttcagtatttactggggtaggtgaacgtactcgtgagggtaacgacttgtactatgaaatgaaagactctggagttattaataaaactgccatggtatttggtcaaatgaatgagccaccaggtgcacgtatgcgtgttgccttaacaggattaacaatggcagagtacttccgtgatgaagaaggacaagacgtactattatttatcgataatatcttccgtttcacacaagcagggtctgaggtatctgcattattagggcgtatgccttcagccgttggatatcaaccaactcttgcaacagaaatgggacgtcttcaagaacgtattacatcaactaaaaaaggatctgttacatct

SEQ ID NO: 307 - DNA, 813 bp, Haemophilus ducreyi
  DSM 8925
gatgcagtaccaaaagtatatgatgctttaaaagttgaatcaggtttaaccttagaagttcaacaacaattaggtggtggtttagtacgttgtatcgcattaggtacctcagatggtttaaagcgtagcttaaaggttgtaaatacaggtaaccctattcaagttcctgtaggcactaaaacattaggccgtattatgaatgtattaggcgaaccaattgatgaaaaaggacctattagcgaagaagctcgttgggatattcatcgtgcggctccaaattatgaagaacagtcaaatagtactgaattacttgaaaccggtatcaaagttattgacttaatttgtccatttgcaaaaggtggtaaagtcggcttatttggtggagctggtgtaggtaaaaccgttaatatgatggaattgatccgtaatattgctattgagcactcaggttattcggtttttgctggtgtaggtgagcgtactcgtgaaggtaatgatttttatcatgaaatgacggattctaatgtattagataaagtatcactagtatatggtcaaatgaatgaaccaccaggtaaccgcctacgtgttgcgttaacaggtttaactatggctgaaaaattccgtgatgaaggtcgtgatgtattatttttcgtagataatatttatcgttatactttagccggtacagaagtttctgctttattaggccgtatgccatcagcggtaggttatcaaccaacccttgcagaagaaatgggtgtattacaagaacgtattacctcaactaaaactggttcaatcacggcagta

SEQ ID NO: 308 - DNA, 826 bp, Haemophilus haemolyticus
  ref <308>: DATABASE ACCESSION NUMBER: ATCC 33390
tgaatttccacaagatgcagtgccaaaagtttacgatgcattaaaagttgaatcaggtttaacacttgaggtgcaacaacaattaggtggcggtgtggtacgttgtatcgcattaggtgcttctgacggtttaaaacgtggtttaaaagtagaaaacacgaatgatccgattcaagtaccggtaggcacaaaaacccttggtcgtatcatgaatgtattgggtgaaccaattgacgaacaaggtccaatcggtgaagaagagcgttgggctatccatcgttctgcaccaagctatgaagaacaatcaaacagtacggaattattagagactggtatcaaagttatcgacttaatttgtccattcgcaaaaggtggtaaagttggtctattcggtggtgcgggtgtaggtaaaaccgttaacatgatggaattaatccgtaacatcgcgatcgagcactcaggttactccgtatttgcgggtgtaggtgaacgtactcgtgaaggtaacgacttctatcatgaaatgaaagattctaacgtattagataaagtatctttggtttatggtcagatgaatgagccaccaggtaaccgtttacgtgttgcgttaactggtttaaccatggcagaaaaattccgcgatgaaggtcgtgatgtattattcttcgtggataatatctatcgttatacccttgctggtacggaagtatctgcgttattaggtcgtatgccatctgcggtaggttaccaaccaactcttgctgaagaaatgggtgtgttacaagaacgtatcacttcaaccaaaacaggttctattacatctgta

SEQ ID NO: 309 - DNA, 809 bp, Haemophilus parahaemolyticus
  ref <308>: DATABASE ACCESSION NUMBER: ATCC 10014
gatgcagtaccaaaagtatatgatgcgttaaaagttgaatcaggtttaacgcttgaagttcaacaacaattaggcggtggcttagtgcgctgtatcgcattaggtacgtctgatggtttaaaacgtggcttaaaagtagaaaatacaggcaacccaattgaagtgccagtgggcactaaaacccttggtcgtattatgaacgtattgggtgagccgattgacgaaaaaggtcctatcggtgaagaagcacgctgggcaatccaccgtgcagcaccaagctacgaagagcaatcaaatagcacggaattactcgaaacaggtatcaaagttatcgacttaatctgcccattcgcaaaagggggtaaagttggtttatttggtggtgcaggtgtaggtaaaaccgtaaatatgatggagttaatccgtaacatcgcgatcgaacactctggttactctgtatttgcaggggtaggtgagcgtactcgtgaaggtaatgacttctaccacgaaatgacagactctaacgtattagataaagtatcgttagtgtatggtcaaatgaacgaaccaccaggtaaccgtttacgcgtagctttaacaggcttaaccatggcggaaaaattccgcgatgaaggtcgtgacgtattattcttcgtcgataacatctaccgttataccctagcaggtacggaagtgtcagcacttctcggtcgtatgccatctgcggtaggttatcagccaaccttagcagaagaaatgggtgtattacaagagcgtatcacttcaaccaaaactggttctatcacctc

SEQ ID NO: 310 - DNA, 824 bp, Haemophilus parainfluenzae
  ref <308>: DATABASE ACCESSION NUMBER: ATCC 7901
cgaatttccacaagatgcagtaccaaaagtttatgatgcattaaaagttgaatcgggtttaacccttgaagttcaacaacaattaggtggtggtgtggtacgttgtatcgcactgggagcttctgacggtttaaaacgcagtttaagcgttgaaaataccaataaaccaatttcagtaccggttggtgtaaaaactctcggtcgtattatgaacgtattgggcgaaccgattgatgaaagaggtcctatcggtgcggaagaagaatgggcaattcaccgttctactccaagttatgaagaacagtccaacagtaccgaattattagaaaccggtatcaaagttatcgacttaatttgtccattcgcgaagggtggtaaagttggtttattcggtggtgcgggtgtaggtaagaccgtaaatatgatggaattaatccgtaatattgcgattgagcactcaggttactccgtatttgccggtgtaggtgagcgtacccgtgaaggtaacgacttctaccatgaaatgacagaatctaacgtattagacaaagtatccctagtttacggacaaatgaatgagccgccgggtaaccgtttacgtgttgctttaaccggtttaaccatggcagaaaaattccgtgacgaaggtcgtgatgtattattcttcgtggataacatctatcgttatacccttgcagggactgaagtatcggcacttttaggccgtatgccatcagcggtaggttatcagccgacacttgcagaagaaatgggtgtgttacaagaacgtattacatcaaccaaaacaggttctattacttctg

SEQ ID NO: 311 - DNA, 811 bp, Hafnia alvei
  ref <308>: DATABASE ACCESSION NUMBER: ATCC 13337
gccgtgcctaaagtgtataacgcacttgaggtgaaaggcggtgccactaaactggtactggaagttcagcagcagctaggcggcggcgttgtacgctgtatcgctatgggtacttctgacggtctgcgtcgcggactggacgttgttgacctggagcacccgattgaagtcccagtaggtaaagcgaccttaggccgcattatgaacgtactgggtgagccaattgatatgaagggtgatatcggcgaagaagatcgctgggctattcaccgtgaagctccaagctacgaagaactgtctaactcgcaagaactgctggaaactggtatcaaggtaatggacctgatttgtccgttcgctaagggcggtaaagttggtctgttcggtggtgcgggtgttggtaaaacagtaaacatgatggagctgatccgtaacatcgcgatcgagcactcaggttactctgtatttgccggcgtgggtgaacgtactcgtgagggtaacgacttctaccacgaaatgaccgactccaacgtattggacaaagtatcactggtttatggccagatgaacgagccaccaggaaaccgtctgcgcgttgcgctgaccggtctgactatggctgagaagttccgtgacgaaggtcgtgacgtactgctgttcatcgataacatctaccgttataccttggccggtaccgaagtatctgcactgttgggtcgtatgccttctgcggtaggttatcagccaacgctggcggaagagatgggtgttctgcaagaacgtatcacctcgaccaaaacgggttcaatca

SEQ ID NO: 312 - DNA, 831 bp, Kingella kingae
  ref <308>: DATABASE ACCESSION NUMBER: ATCC 23330
gcgatgctattccacgcgtttacgatgcgttgaaactggttgatgtggacttgacattagaagtgcaacaacaactgggcgatggcgtagtgcgtaccattgcgatgggtagtaccgatggtttgaaacgcggcttagccgtgaacaacacaggcgcacctattacagtgcctgttggtaaagcaacattgggtcgtattatggacgtattgggtaatcctgttgatgaagcaggtccaattggttctgaccaaacgcgtgctattcaccaaccagctcctaaatttgatgaactgtctagcgcaaccgaattgctggaaacaggcatcaaagtgattgacttgctttgcccatttgcaaaaggtggtaaagtaggtttgtttggtggtgcaggtgtgggcaaaactgtgaacatgatggagttgattaacaacattgccaaagcgcacagtggtttgtctgtatttgcaggcgtgggtgaacgtactcgcgaaggtaatgacttctatcacgagatgaaagattctaacgtgttggataaagttgccatggtgtatggtcaaatgaatgaacctcctggcaaccgtttgcgcgttgcattgactggtttgtctatggcagaacacttccgtgatgaaaaagacgaaaatggcaaaggtcgcgatgtattgttctttgtggacaacatctatcgctacacattggcaggtacagaagtatcggcattgctgggtcgtatgccctctgcggtaggttatcaaccaacattggcagaagaaatgggtcgtttgcaagagcgtattacttcaacgcaaacaggttcgattactt

SEQ ID NO: 313 - DNA, 812 bp, Klebsiella pneumoniae subsp. ozaenae
  ref <308>: DATABASE ACCESSION NUMBER: ATCC 11296
atgccgtaccacgcgtgtacgaagcccttgaggtacagaatggtaatgaagttctggtgctggaagttcagcagcagctgggcggcggtatcgtacgtaccatcgccatgggttcttctgatggtctgcgccgcggtctggatgtaaaagacctcgagcacccgatcgaagtcccggtaggtaaagcaacgctgggtcgtatcatgaacgtactgggtcaaccggttgacatgaaaggcgacatcggcgaagaagagcgttgggctatccaccgcgcggcaccgtcctatgaagagctgtccagctctcaggaactgctggaaaccggcatcaaagttatcgacctgatgtgtccgttcgccaagggcggtaaagttggtctgttcggcggtgcgggtgtaggtaaaactgtaaacatgatggagctgatccgtaacatcgcgatcgagcactccggttactctgtgtttgcgggcgtaggtgagcgtactcgtgagggtaacgacttctaccacgaaatgaccgactccaacgttatcgataaagtatccctggtgtacggccagatgaacgagccgccgggaaaccgtctgcgcgttgcgctgaccggcctgaccatggctgagaaattccgtgacgaaggtcgtgacgtactgctgttcgtcgataacatctatcgttacaccctggccggtactgaagtatccgcgctgctgggtcgtatgccttcagcggtaggttatcagccgaccctggcggaagagatgggcgttctgcaggaacgtatcacctccaccaaaaccggttctatc

SEQ ID NO: 314 - DNA, 812 bp, Klebsiella ornithinolytica
  ref <308>: DATABASE ACCESSION NUMBER: ATCC 31898
atgccgtaccgcgcgtgtacgatgctcttgaggtacagaatggtaatgagagcctggtgctggaagttcagcagcagctcggcggtggtatcgtacgtgctatcgccatgggttcttccgacggtctgcgtcgtggtctggaagttaaagaccttgagcacccgatcgaagtcccggttggtaaagcaacgctgggtcgtatcatgaacgtgctgggtcagccaatcgatatgaaaggcgacatcggcgaagaagagcgttgggctattcaccgtgcagctccgtcctatgaagagctgtccagctctcaggaactgctggaaaccggcatcaaagttatcgacctgatgtgtccgttcgctaagggcggtaaagttggtctgttcggtggtgcgggtgtaggtaaaaccgtaaacatgatggagctgatccgtaacatcgcgatcgagcactccggttactccgtgtttgcgggcgtaggtgaacgtactcgtgagggtaacgacttctaccacgaaatgaccgactccaacgttctggataaagtatccctggtttatggccagatgaacgagccgccgggaaaccgtctgcgcgttgctctgaccggcctgaccatggctgagaaattccgtgacgaaggtcgtgacgttctgctgttcgtcgataacatctatcgttataccctggccggtactgaagtatccgcactgctgggtcgtatgccttcagcggtaggttatcagccgaccctggcggaagagatgggtgttctgcaggaacgtatcacctccaccaaaaccggttctatc

SEQ ID NO: 315 - DNA, 813 bp, Klebsiella oxytoca
  ref <308>: DATABASE ACCESSION NUMBER: ATCC 33496
gtaccgcgcgtgtacgaggctcttgaggtacaaaatggtagtgagaatctggtgctggaagttcagcagcagctcggcggcggtattgttcgtaccatcgccatgggttcttccgacggtctgcgtcgcggtctggaagtcaaagacctcgagcatccgatcgaagtcccggtaggtaaagcaacgctgggtcgtatcatgaacgtactgggccaaccggtagacatgaaaggcgacatcggcgaagaagagcgttgggcgattcaccgcgcagcgccttcctacgaagagttgtcaaactctcaggaactgctggaaaccggcatcaaagttatcgacctgatgtgtccgtttgcgaagggcggtaaagttggtctgttcggtggtgcgggtgtaggtaaaaccgtaaacatgatggagctgatccgtaacatcgcgatcgagcactccggttactccgtgtttgcgggcgtaggtgaacgtactcgtgagggtaacgacttctaccacgaaatgaccgactccaacgttatcgataaagtatccctggtgtatggccagatgaacgagccgccgggaaaccgtctgcgcgttgcgctgaccggcctgaccatggctgagaagttccgtgacgaaggtcgtgacgttctgctgttcgtcgataacatctatcgttacaccctggccggtactgaagtatccgcactgctgggtcgtatgccttcagcggtaggttaccagccgactctggcggaagagatgggcgttctgcaggaacgtatcacctccaccaaaacgggttctatcacttcc

SEQ ID NO: 316 - DNA, 822 bp, Klebsiella planticola
  ref <308>: DATABASE ACCESSION NUMBER: ATCC 33531
gatgccgtaccgcgcgtgtacgatgctcttgaggtacagaatggtaatgagagcctggtgctggaagttcagcagcagctcggcggtggtatcgtacgtgctatcgccatgggttcttctgacggtctgcgtcgtggtctggaagttaaagaccttgagcacccgatcgaagtcccggttggtaaagcaacgctgggtcgtatcatgaacgtgctgggtcagccgatcgatatgaaaggcgacatcggcgaagaagagcgttgggctattcaccgcgcagctccgtcttatgaagagctgtccagttctcaggaactgctggaaaccggcatcaaagttatcgacctgatgtgtccgttcgctaagggcggtaaagtaggtctgttcggtggtgcgggcgtaggtaaaaccgtaaacatgatggagctgatccgtaacatcgcgatcgagcactccggttactccgtgtttgcgggcgtcggtgaacgtactcgtgagggtaacgacttctaccacgaaatgaccgactccaacgttctggataaagtatccctggtttatggccagatgaacgagccgccgggaaaccgtctgcgcgttgctctgaccggcctgaccatggctgagaaattccgtgacgaaggtcgtgacgttctgctgttcgtcgataacatctatcgttataccctggccggtactgaagtatccgcactgctgggtcgtatgccttcagcggtaggttatcagccgaccctggcggaagagatgggtgttctgcaggaacgtatcacctccaccaaaaccggttctatcacttccgta

SEQ ID NO: 317 - DNA, 785 bp, Klebsiella pneumoniae subsp. pneumoniae
  ref <308>: DATABASE ACCESSION NUMBER: ATCC 13883
agaatggtaatgaagttctggtgctggaagttcagcagcagctgggcggcggtatcgtacgtaccatcgccatgggttcttctgatggtctgcgccgcggtctggatgtaaaagacctcgagcacccgatcgaagtcccggtaggtaaagcaacgctgggtcgtatcatgaacgtactgggtcaaccggttgacatgaaaggcgacatcggcgaagaagagcgttgggctatccaccgcgcggcaccgtcctatgaagagctgtccagctctcaggaactgctggaaaccggcatcaaagttatcgacctgatgtgtccgttcgccaagggcggtaaagttggtctgttcggcggtgcgggtgtaggtaaaactgtaaacatgatggagctgatccgtaacatcgcgatcgagcactccggttactctgtgtttgcgggcgtaggtgagcgtactcgtgagggtaatgacttctaccacgaaatgaccgactccaacgttatcgataaagtatccctggtgtacggccagatgaacgagccgccgggaaaccgtctgcgcgttgcgctgaccggcctgaccatggctgagaaattccgtgacgaaggtcgtgacgtactgctgttcgtcgataacatctatcgttacaccctggccggtactgaagtatccgcactgctgggtcgtatgccttcagcggtaggttatcagccgaccctggcggaagagatgggcgttctgcaggaacgtatcacctccaccaaaaccggttctatcacctccgta

SEQ ID NO: 318 - DNA, 759 bp, Kluyvera ascorbata
  ref <308>: DATABASE ACCESSION NUMBER: ATCC 33433
ctggtgctggaagttcagcagcagctcggcggcggtatcgtacgtwccatcgctatgggttcttccgacggtctgcgtcgcggtctggatgttaaagatctcgagcacccaatcgaagttccggtmggtaaagcaacmctgggtcgtatcatgaacgtactgggtcakccagtmgacatgaaaggcgacatcggtgaagaagagcgttgggctatccaccgcgctgcaccttcctacgaagagctgtctagctctcaggaattgctggaaaccggtatcaaagttatcgacctgatgtgtccgttcgctaagggcggtaaagtcggtctgttcggtggtgcsggtgttggtaaaaccgtaaacatgatggagctgatccgtaacatcgcgatcgagcactccggttactccgtgtttgcgggcgtaggtgaacgtactcgtgagggtaacgacttctaccacgaaatgaccgactccaacgttatcgataaagtatccctggtatatggccagatgaacgagccaccgggaaaccgtctgcgcgttgctctgaccggtctgaccatggctgagaaattccgtgacgaaggtcgtgacgtactgctgttcgtcgataacatctatcgttacaccctggccggtactgaagtatctgcwctgctgggtcgtatgccttcagcggtaggttaccagccgaccctggcggaagagatgggcgttctgcaggaacgtatcacctccaccaagaccggttctatc

SEQ ID NO: 319 - DNA, 831 bp, Kluyvera cryocrescens
  ref <308>: DATABASE ACCESSION NUMBER: ATCC 33435
ttccctcaggatgccgtaccgcgtgtgtacgaagcccttgaggttcagaatggtaatgaagtgctggtgctggaagttcagcagcagctcggcggcggtatcgtacgtaccatcgctatgggttcttccgacggtctgcgtcgtggtctggatgtaaaagacctcgagcacccgatcgaagtcccggtaggtaaagcaacactgggtcgtatcatgaacgtactgggccaaccggtagacatgaaaggcgacatcggtgaagaagaacgttgggctatccaccgtgcagcaccttcctacgaagagctgtcaagctctcaggaactgctggaaaccggcatcaaagttatcgacctgatgtgtccgtttgcgaagggcggtaaagttggtctgttcggtggtgcgggtgtaggtaaaaccgtaaacatgatggagcttattcgtaacatcgcgattgagcactccggttattctgtgtttgcgggcgtaggtgaacgtactcgtgagggtaacgacttctaccacgaaatgaccgactccaacgttatcgataaagtttccctggtttacggccagatgaacgagccaccaggaaaccgtctgcgcgttgcgctgactggtctgactatggctgagaagttccgtgacgaaggtcgcgacgtactgctgttcgtcgataacatctatcgttacaccctggccggtacagaagtatctgcactgctgggtcgtatgccttcagcggtaggttaccagccgactctggcggaagagatgggcgttctgcaggaacgtatcacctccaccaaaaccggttctatcacctccgta

SEQ ID NO: 320 - DNA, 810 bp, Kluyvera georgiana
  ref <308>: DATABASE ACCESSION NUMBER: ATCC 51603
gccgtaccgcgcgtgtacgaagcccttgaggtacagaatggtaatgaagtgctggtgctggaagttcagcagcagctcggtggcggtatcgtgcgtaccatcgccatgggttcctccgacggtctgcgtcgcggtctggaagttaaagatctcgagcacccgatcgaagttccggtaggtaaagcaacactgggtcgtatcatgaacgtactgggtcacccggtagacatgaaaggcgacatcggtgaagaagagcgttgggctatccaccgcgctgcgccttcctacgaagagctgtccagctctcaggaactgctggaaaccggtatcaaagttatcgacctgatgtgtccgttcgcgaagggcggtaaagtcggtctgttcggcggtgcgggtgttggtaaaaccgtaaacatgatggagctgatccgtaacatcgcgatcgagcactccggttactctgtgtttgcgggcgtaggtgaacgtactcgtgagggtaacgacttctaccacgaaatgaccgactccaacgttatcgataaagtatccctggtgtatggccagatgaacgagccgccgggaaaccgtctgcgcgttgcgctgaccggcctgaccatggctgagaaattccgtgacgaaggtcgtgacgtactgctgttcgtcgataacatctatcgttacaccctggccggtactgaagtatctgcactgctgggtcgtatgccttcagcggtaggttaccagccgactctggcggaagagatgggcgttctgcaggaacgtatcacctccaccaagaccggttctatc

SEQ ID NO: 321 - DNA, 834 bp, Lactobacillus acidophilus
  ref <308>: DATABASE ACCESSION NUMBER: ATCC 4356
tcgataagaatttacctgatattaacaacgccttacgtgtaatcaagtccgaagatgaaagcatcgttcttgaagttacacttgaactcggtgatggtgttttaagaacaatcgccatggaatctaccgatggtcttcgtcgtggtatgaaagtcgaagatactggcgctccaatttcagttccagttggagaagacactttaggtcgtgtgtttaacgttttaggacagcctattgatggtggtccagcctttccaaaggatcacccacgtgagggtatccacaaggaagcacctaaatatgaagatttaactactagtcgtgaaattcttgaaactggtatcaaggttatcgaccttcttgaaccatatgttcgtggtggtaaagttggtttgtttggtggtgccggtgttggtaaaactactattattcaagaattaattcacaacatcgctcaagaacacggtggtatttccgtatttactggtgttggtgaaagaactcgtgaaggtaatgacctttactttgaaatgaaagcttcaggcgttttaagtaagactgccatggtatttggtcagatgaacgagccgcctggtgccagaatgcgtgttgcattaaccggtttgacacttgctgaatactttagagatgttgaaggtcaagacgtattgctctttattgacaatatctttagatttactcaggctggttcagaggtatctgctttgcttggtcgtatgccaagtgccgtaggttatcagccaactttggcaacagaaatgggtcaattgcaggaaagaattacttctactaagaagggttcaattacttcaa

SEQ ID NO: 322 - DNA, 824 bp, Legionella pneumophila subsp. pneumophila
  ref <308>: DATABASE ACCESSION NUMBER: ATCC 33152
ttcctcgtgatagcgtgcctaaagtcaatgatgcgttaaagcttgttgatagtgatctggtttttgaagtgcagcagcaacttggagacggagttgtgcgtactattgccatgggaacaaccgatggtttaaagcgaggattaaaagcagaaaatacaggccatcctattcaagtgccagtaggtaagaaaactttgggacgcattatggatgttcttgggcgtcctgtagatgatgctgggcctatcgatgctgaagagacttgggctattcatcgtaaagcaccaagttatgaagagcaagctggcagccaggaattattggaaactggtattaaagtaattgatttgctttgcccttttgccaagggaggtaaagttggtctattcggtggtgccggtgtaggcaaaaccgttaacatgatggaattaatacgaaacattgcaattgagcatagcggttattcagtgtttgcaggggttggtgaacgtacccgtgaaggaaacgacttctatcatgagatgaaagactctaatgtattggataaagtatcgcttgtttatggtcagatgaatgagccgccaggaaaccgtttgcgtgttgctctaaccggtttgactatggctgaaaaattccgggatgaagggcgagacgttcttttgtttatcgataatatttatcgttataccttggctggggttgaagtatctgcgctgttaggccgtatgccttctgcagtaggatatcagccgacattagcagaggaaatgggtatgctgcaagagcgcattacctccacaaaaacaggttctattacttccata

SEQ ID NO: 323 - DNA, 818 bp, Leminorella grimontii
  ref <308>: DATABASE ACCESSION NUMBER: ATCC 33999
gacgccgtaccgaaagtgtacgatgcgcttgaagttcaaattgatgccaagctggttctggaagttcaacagcagctcggcggcggcgttgttcgctgcatcgcgatgggtacttcagacggcttaagccgcggtctggacgtgctcgatctggaacacccgattgaagtaccggtgggcaaagcgacgctgggccgcatcatgaacgtgcttggtcaccctatcgacatgaagggcgacatcggcgaagaagagcgttgggctattcaccgcgcagcgccgagctacgaagacctgtcgggcgcaaccgagctgctggagaccggcatcaaggttatcgacctgatttgtccgttcgccaagggcggtaaagtcggcctgttcggcggcgccggcgtaggtaaaaccgtaaacatgatggagctcattcgcaacattgcgaccgagcactccggttactccgtgtttgcaggcgtaggtgaacgtacccgtgagggtaacgacttctaccacgaaatgactgaatccaacgtattggacaaggtgtcgctggtatacggtcagatgaacgagccgcctggaaaccgtctgcgcgtagcgttaacgggcttgaccatggcggagaagttccgtgatgaaggccgtgacgttctgctgtttatcgacaacatttaccgctataccctggccggtacggaagtatccgcactgctgggccgtatgccttcagccgtaggctaccagccgactctggctgaggaaatgggcgtgcttcaagagcgtattacctctaccaagacggggtctatcacctccgt

SEQ ID NO: 324 - DNA, 835 bp, Listeria monocytogenes
gtggaaacttacctgaaatctacaatgccctagttattgaatataaatctgatgcagaagaagcaccaactagccaacttactttagaagtagccatccaattaggtgatgatgttgtacgtacaatcgcaatggcatcaacagatggtgttcaaagaggtatggaagttattgatactgggagcccaattacagttcctgtaggtacagtaactcttggtcgtgtatttaatgtattaggaaacaccatcgatttggacgaaccacttccaagcgatattaaacgtaataaaattcaccgcgaagctccaactttcgatcaattagcaacgacaacagaaattcttgaaacaggaattaaagtagttgacttgctagctccttacttaaaaggtggtaaaatcggattgttcggtggtgccggtgttggtaaaaccgttctaattcaagagcttatccataatatcgcacaagaacatggtggtatttctgtgttcgctggcgttggagaacgtactcgtgaaggtaacgacctttacttcgaaatgaaagattcaggcgttattgaaaaaacagcgatggtattcggtcaaatgaacgagccaccaggtgcgcgtatgcgtgttgccttaactggtctaacaattgctgaatatttccgtgatgaagaacatcaagatgtacttttattcattgataacattttccgtttcacacaagctggttcagaggtttcggctttactaggtcgtatgccatctgcggtaggttaccaaccaaccctagctactgaaatgggtcaactacaagaacgtattacatctactaacgttgg

SEQ ID NO: 325 - DNA, 828 bp, Micrococcus lylae
  ref <308>: DATABASE ACCESSION NUMBER: ATCC 27566
cccgcgtggcgagttgccggcactgttcaacgcgctgactgtcgaggtcaccctcgaagcagtcgctaaaaccattacccttgaggttgctcagcacctcggcgacaacttggttcgtgccgtgtccatggcaccgaccgacggtctcgtccgtggcgctgctgtgatcgacagcggtaagccgatctcagttcccgttggtgacgtagtcaagggacacgtcttcaacgctctgggtgattgcctcgatgagccaggtcttggccgtgacggtgagcagtggggcatccaccgcgatccgccaccttttgaccagcttgagggtaagaccgagattctggaaaccggtattaaggtcatcgacctgctgaccccgtatgttaagggcggcaagatcggcctgttcggtggtgctggtgtgggtaagaccgttcttatccaggaaatgatcacccgtatcgctcgcgagttctccggtacctcggtgttcgcaggcgtgggtgagcgtacccgtgagggcaccgacctcttcctggaaatggaagagatgggcgttctccaggacaccgctcttgtgttcggccagatggacgagcctccaggagttcgtatgcgcgtggcgctgtccggcctgaccatggcggagtacttccgcgatgtgcagcaccaggacgtgcttctgttcatcgacaacatcttccgtttcacccaggcaggttccgaggtttccaccctcctaggccgcatgccttctgccgtgggttaccagccaacgctggcagacgagatgggtgttctgcaggagcgtattacctccacaaagggtaa

SEQ ID NO: 326 - DNA, 822 bp, Moellerella wisconsensis
  ref <308>: DATABASE ACCESSION NUMBER: ATCC 35017
gatgccgtaccaaaagtgtacgatgctcttgaggttcttaacggtaaagaaaaattggtgctggaagttcagcaacaattaggcggtggtgttgttcgttgtatcgcaatgggtacatcagatggtttaagccgcggtttagaagttaaaaatacagatcatccgatcgaagttcctgtcggtgttaaaacgcttggccgtatcatgaacgtgctgggtgacccaatcgacatgaaaggtgatatcggcgaagaagaacgctggtcaattcaccgcgcagcaccaagctatgaagatctggctaactcaacagaacttctagaaacaggtatcaaagttatggacctgatttgcccattcgctaaagggggtaaagtgggtctgttcggtggtgcgggtgtcggtaaaacagttaacatgatggagcttattcgtaatatcgcgattgagcactcaggttattctgtattcgcgggtgttggtgaacgtactcgtgaaggtaacgatttctaccatgaaatgacagactcaaacgttctggataaagtttcattggtttatggccagatgaatgagccaccaggaaaccgtctgcgtgttgctctgactggtctgactatggcagagaaattccgtgacgaaggtcgtgacgtactgttattcgtagataatatttatcgttataccttagcagggacagaagtatctgcactgctgggtcgtatgccttcagcggtgggttatcagccaacgctggcggaagagatgggtgttctgcaagaacgtatcacctcgactaagaccggctctatcacttccgta

SEQ ID NO: 327 - DNA, 854 bp, Branhamella catarrhalis
  ref <308>: DATABASE ACCESSION NUMBER: ATCC 43628
ccgtggcgatgtcccccaaatctttgatgcacttcatgttgatggtactgaaaccacccttgaagtccaacaacagttaggtgatggtgtggtgcgtaccattgccatgggttctaccgaaggcttaaagcgtggcttgcctgtctctaattcaggtgcacccatttcggtaccagtcggtcaagcaacactgggtcgcattatggatgtcctaggtcgcccaatcgatgaagcaggtccggtaaatgctgaacaaaaatggtccattcatcgtgaagcaccaagttatgatgaacagtcaaatagtacagaacttttagaaacaggcatcaaagtgattgatttgctttgtccatttgccaaaggtggtaaagtcggtctgttcggtggtgctggtgttggtaagaccgttaacatgatggagcttatcaataatatcgccctaaaacactcaggtctgtcggtttttgctggtgtgggtgagcgtactcgtgagggtaatgacttctaccatgaaatgcaagaagcaggcgttgttaataccgaagattttactcagtcaaaagttgccatggtttatggtcagatgaatgagccaccaggaaaccgtctgcgtgttgccttaactggtttgaccatggcagagtatttccgtgatgaaaaagacgaagcaacgggcaaaggccgtgatgttctgctgttcgttgataatatttatcgttacacattggcaggtactgaggtatcagcacttttaggtcgtatgccatctgcggtaggttatcagccgactttggccgaagagatgggcttgctacaagagcgtatcacctccacccaatcaggctcaatta

SEQ ID NO: 328 - DNA, 831 bp, Moraxella osloensis
  ref <308>: DATABASE ACCESSION NUMBER: ATCC 19976
ccgtcaaagcgtaccaagaatttatgatgccttaaaagttgaaggcacagaaactacattagaagtacaacaacaattgggtgatggtatcgtacgtactattgccatgggttctactgaaggtctaaaacgtggtctaccagttagcaacactggcgcaccaatctctgtacctgtgggtaaaggtacactaggtcgtatcatggacgttttaggacacccaatcgatgaggcaggtccggtagagcatagtaacacttgggcgattcaccgtgaagcgccaagctatgatgaacaatcaaactctactgaacttttagaaaccggtattaaagtaattgacttactatgcccatttgctaaaggtggtaaagtcggtctgttcggtggcgcgggtgttggtaaaaccgttaacatgatggaacttatcaataacatcgcaaaagcacactcaggtttatcggtatttgctggtgtaggtgagcgtactcgtgaaggtaatgacttctaccacgagatgaaagactcaaacgtacttgataaagttgcgatggtgtatggtcagatgaatgagccaccaggaaaccgtttacgtgttgccctgacaggtttaaccatggcagaatacttccgtgacgaaaaagatgaaaacggtaaaggtcgtgacgtattattgttcgttgacaatatttatcgttacacgctagcgggtaccgaagtatcagcattattaggtcgtatgccatctgcagtagggtatcagccaacgcttgcagaagagatgggtgtactacaagaacgtattacttcaacccaatcaggctctattac

SEQ ID NO: 329 - DNA, 835 bp, Morganella morganii subsp. morganii
  ref <308>: DATABASE ACCESSION NUMBER: ATCC 25830
cgaatttcctcaggatgcagtaccgaaagtgtacgatgcgcttgaggtaacaaatggtaaagaaaaactggtgctggaagttcagcagcagttaggcggcggggttgtccgttgtatcgctatgggtacatctgatggtctgagccgtaatctggaagtaaccgatttaggccacccgatcgaagtccctgtcggcgtgaaaaccttaggacgtatcatgaacgttctgggtgatccgatcgatatgaaaggtgacatcggcgcagaagaaaaatggtctattcaccgtgctgcaccaacatacgaagaactgtctaactcccaggaactgctggaaacaggtatcaaagtaatggacctgatctgcccgttcgcgaagggtggtaaagtcggtctgttcggtggtgcgggtgtgggtaaaaccgtaaacatgatggaactgatccgtaacatcgcgatcgagcactccggttactctgtattcgcaggggtcggtgagcgtacccgtgaaggtaacgacttctatcatgaaatgacagactccaacgttctggacaaagtatcactcgtgtacggccagatgaacgagccaccgggaaaccgtctgcgcgttgctctgaccggtctgaccatggcggaaaaattccgtgatgaaggccgcgatgtactgctgttcgttgataacatctaccgttataccctggccggtactgaagtatccgcgctgttaggccgtatgccttcagcggtaggttaccagccgacactggcggaagaaatgggtgtgcttcaggaacgtatcacatcgaccaaaacaggctctatcacgtctgta

SEQ ID NO: 330 - DNA, 824 bp, Pantoea agglomerans
  ref <308>: DATABASE ACCESSION NUMBER: ATCC 27155
gacgcggtaccgcaagtgtacagcgccctcgaggttatgaatggtgatgcgcgtctggtgctggaagttcagcagcagctcggcggcggcgtagtacgtaccatcgcaatgggtacgtctgacggcctgaagcgtggtctgagcgtcaacgacctgcagaaaccgattcaggtacccgtcggtaaagcgaccctgggccgtatcatgaacgttctcggcgagccaatcgatatgaaaggcgagctgaaagaagaagatggcagcgcagtagagatcgcctctattcaccgcgcagccccttcttatgaagatcagtctaactcgcaggaactgctggaaaccggcatcaaggttatcgacctgatgtgtccgtttgctaaaggcggtaaagtcggtctgttcggtggtgcgggtgtaggtaaaaccgtcaacatgatggaactgatccgtaacatcgcggctgaacactcaggttactcagtgtttgccggtgtgggtgagcgtactcgtgagggtaacgacttctaccacgaaatgactgactctaacgttatcgataaagttgcactggtctatggccagatgaacgagccgccgggtaaccgtctgcgcgtagcactgaccggtctgaccatggcggaaaaattccgtgatgaaggtcgcgacgttctgctgttcatcgataacatctaccgttataccctggccggtacagaagtttctgcactgctgggtcgtatgccatctgcggtaggttaccagccaacgctggcagaagagatgggtgtgttgcaggagcgtattacctccaccaagaccggttc

SEQ ID NO: 331 - DNA, 808 bp, Pantoea dispersa
  ref <308>: DATABASE ACCESSION NUMBER: ATCC 14589
tatacagcgctctcgaggtaaaaaatggtgatgctcgtctggtgctggaagtacagcagcagctgggcggtggcgtggtgcgtaccatcgccatgggttcttctgacggcctgaagcgcggtctggaagtcaccgacctgaaaaaacctatccaggttccggttggtaaagcaacactcggccgtatcatgaacgtgctgggtgagccaatcgacatgaaaggcgacctgaaagaagaagacggcagcgctgtagaggtttcctctattcatcgcgcagcgccttcttatgaagatcagtcaaactcgcaggaactgctggaaaccggcatcaaggttatcgacctgatgtgtccgttcgcgaagggcggtaaagtcggtctgttcggtggtgcgggtgtaggtaaaaccgtaaacatgatggagctgatccgtaacatcgcggctgagcactcaggttattcggtctttgccggcgtgggtgagcgtactcgtgagggtaacgacttctaccacgaaatgacggactccaacgttatcgataaagtagcgctggtgtatggccagatgaacgagccgccgggtaaccgtctgcgcgtagcactgaccggtctgaccatggcggaaaaattccgtgatgaaggccgtgacgttctgctgttcatcgacaacatctaccgttacaccctggccggtacagaggtttctgcactgctgggtcgtatgccatcggcggtaggttatcagccaacgctggctgaagagatgggtgtgctgcaggagcgtattacctccaccaagaccggttc

SEQ ID NO: 332 - DNA, 805 bp, Pasteurella multocida
  NCTC 10322
gatgcagtaccaaaagtatatgatgccttaaatgttgaaacaggtttagtacttgaagttcaacaacaattaggtggtggtgtagttcgctgtatcgcaatgggatcatctgatggattaaaacgcggtttaagcgtaacaaatacgaataacccaatttctgttccagtgggaacgaaaacattgggtcgtatcatgaacgtattgggtgaaccaatcgatgagcaaggtgaaatcggtgcagaagagaattggtctattcaccgtgcgccaccaagttatgaagaacaatctaacagtactgaacttttagaaacgggaattaaagttatcgacttagtttgtccgtttgcgaaagggggtaaagtaggtttattcggtggtgcgggtgtcggtaaaaccgtcaatatgatggaattaatccgtaacatcgcaattgagcactcaggttactctgtctttgcgggggtaggtgagcgtacgcgtgaaggtaacgacttctatcatgagatgaaagactctaacgtattagataaagtgtctcttgtttatggtcaaatgaacgagccaccaggtaaccgtttacgtgtggcattaacaggcttaactatggcggaaaaattccgtgatgaaggtcgtgatgtcttattcttcgttgataatatttatcgttatactcttgctggtacagaagtttctgcattattaggtcgtatgccatctgcggtaggttatcaaccaacccttgcagaagaaatgggtgttctgcaagagcgtattacctcaaccaaaacaggttctatta

SEQ ID NO: 333 - DNA, 828 bp, Pragia fontium
  ref <308>: DATABASE ACCESSION NUMBER: ATCC 49100
tttcctcaagacgccgtaccaaaagtgtacgacgcgcttgaagttcagaacgatgccaagctggtgctggaagttcaacaacagctcggtggtggtgtcgttcgttgtatcgcaatgggtacttccgatggcttaagccgcggtttaaaagtgcttgatttagaacatcctatcgaagtaccggttggtactgcgacgctgggccgtattatgaacgtgctcggtcagccaatcgatatgaaaggcgatattggtgaagaagagcgttgggctattcaccgtgaagcaccaagttatgaagatttatctggcgccaatgaactgctggaaacgggtatcaaggttatcgacctgatttgtccgtttgctaaaggtggtaaagttggtctgtttggtggtgcgggtgtaggtaaaaccgtaaacatgatggagctgattcgtaacattgcgactgagcactcaggttactccgtattcgccggtgtaggggaacgtacccgtgaaggtaatgacttctaccacgaaatgaccgaatcaaacgtactggataaagtatctctggtttatggccagatgaacgagccaccaggaaaccgtctgcgcgtggcgttaacgggtttgaccatggctgaaaaattccgtgatgaaggtcgtgacgttctgttatttatcgataacatttatcgctataccttagccggtaccgaagtatcagcactgttggggcgtatgccatcagcggtaggttatcagccaacgttagcagaagagatgggtgtgttgcaggaacgtattacttcaaccaaaaccggttcaatcacttctgta

SEQ ID NO: 334 - DNA, 807 bp, Proteus mirabilis
  ref <308>: DATABASE ACCESSION NUMBER: ATCC 25933
gtccctaaagtatacgacgctcttgaggttatgaatggtaaagaaaaactggtgctggaagttcagcaacagttaggcggtggtatcgttcgttgtatcgcaatgggtacatcagacggtttaagccgtggcttaaaggttgaagatttaggccacccaattgaagtaccagtaggtaaagcgactttaggacgtatcatgaacgttctgggtacacctattgatatgaaaggtgagattgaaaccgaagagcgttggtcaatccaccgtgaagcaccaacttacgaagagttatcaaactctcaagaactgcttgaaaccggtatcaaagttatggacttaatctgtccatttgctaaaggtggtaaagtcggtctgttcggtggtgcgggtgttggtaaaacagttaacatgatggaattgatccgtaatatcgcgatcgagcactcaggttactctgtatttgctggtgttggtgagcgtactcgtgagggtaacgacttctatcatgaaatgacagattctaacgttcttgacaaagtatcgttagtttacggtcagatgaatgagccaccaggaaaccgtctgcgtgttgcactgactggtctgactatggctgagaaattccgtgatgaaggccgtgacgtactgttattcgtcgataacatctatcgttacaccttagccggtacagaagtatcagcactgttaggtcgtatgccatcagcggtaggttaccaaccaacattggctgaagagatgggtgttctgcaagagcgtatcacttcaaccaaaacaggttctatc

SEQ ID NO: 335 - DNA, 811 bp, Proteus vulgaris
  ref <308>: DATABASE ACCESSION NUMBER: ATCC 13315
ccctaaagtatacgacgctcttgaggttatgaatggtaaagagaaactggtgctagaagttcagcaacagttaggcggtggtatcgttcgttgtatcgcaatgggtacatcagacggtttaagccgtggcttaaaagttgaaaacttaggccacccaattgaagtaccagtaggtaaagcaacactgggacgtatcatgaacgttctgggtacacctatcgatatgaaaggtgatattgcaactgaagaacgttggtctattcaccgcgaagcgccaacctatgaagagttatcaagctctcaagaactactagaaaccggtatcaaagtaatggacttaatctgtccgtttgctaaaggtggtaaagtaggtctcttcggtggtgcgggtgttggtaaaacagttaacatgatggaattgatccgtaacatcgcgattgagcactcaggttattctgtatttgcaggtgttggtgagcgtactcgtgagggtaacgacttctatcatgaaatgacagattctaacgttcttgacaaagtatcgttagtttatggtcagatgaatgagccaccaggaaaccgtctacgtgtagcactgacgggtttaaccatggcggaaaaattccgtgatgaaggccgtgacgtactgttattcgtcgataacatctatcgttacaccttagccggtaccgaagtatcagcactgttaggccgtatgccatcagcagtaggttaccaaccaacattggctgaagagatgggtgttctgcaagaacgtatcacttcaaccaaaacaggttcaatcacctct

SEQ ID NO: 336 - DNA, 806 bp, Providencia alcalifaciens
  ref <308>: DATABASE ACCESSION NUMBER: ATCC 9886
tcaagataacgtaccaaaagtgtacgatgctcttgaggttattaacggtaaagaaaaactggtgttggaagttcaacaacagttaggtggtggtgttgtccgttgtatcgcaatgggtacatcagatggtctgagccgtggtttagaagttgtaaacttagagcacccaatcgaagtaccagtcggtaaagcaactctgggacgtatcatgaacgttctgggtgaaccaatcgacatgaaaggtgatatcggcgaagaagagcgctggtctattcaccgtgctgcaccaagctacgaagaattagctaactcaactgaactgctggaaaccggtatcaaagtaatggacttaatctgtccattcgcgaaaggtggtaaagtaggtctgttcggtggtgcgggtgttggtaaaaccgtaaacatgatggaactgatccgtaacatcgcgattgagcactcaggttactcagtgttcgctggtgttggtgagcgtacccgtgaaggtaacgacttctatcatgaaatgacagactcaaacgttctggataaagtatcactggtttatggccagatgaacgagccaccaggaaaccgtctgcgtgttgcgctgactggtctgactatggctgaaaaattccgtgacgaaggtcgtgacgtactgctgttcgttgacaacatttatcgttatacactggcaggtactgaagtatcagcactgttaggtcgtatgccatcagcggtaggttaccaaccaacgctggcggaagagatgggtgttcttcaagaacgtattacctcaactcaaa

SEQ ID NO: 337 - DNA, 830 bp, Providencia rettgeri
  ref <308>: DATABASE ACCESSION NUMBER: ATCC 9250
ttccctcaagatgacgtaccaaaagtgtacgacgctcttgaggttgttaacggtaaagaaacactggtgctggaagttcagcaacagttaggcggtggtgttgtccgttgtatcgcaatgggtacatcagatggcctgagccgtggtttagaagttgtaaacttagagcacccaattgaagtaccagtaggtaaagcaactttaggacgtatcatgaacgttctgggtcagcctattgatatgaaaggtgatatcggcgaagaagagcgctggtcaattcaccgtgctgcacctagctacgaagagttagctaactcaacagagctgctggaaaccggtatcaaagtaatggacttaatctgtccattcgcgaaaggtggtaaagttggtctgttcggtggtgcgggtgttggtaaaacagtaaacatgatggaactgatccgtaacatcgcgattgagcactcaggttactcagtattcgctggtgttggtgagcgtactcgtgaagggaacgacttctatcatgaaatgactgactcaaacgttctggataaagtatcactggtttatggccagatgaatgagccaccaggaaaccgtctgcgcgttgcgttgactggtctgactatggctgaaaaattccgtgacgaaggtcgtgacgtactactgttcgttgacaacatctatcgttatacactggcaggtactgaagtatcagcactgttaggtcgtatgccttcagcggtaggttatcagccaacgctggcggaagagatgggtgttctgcaagaacgtattacctcaactcaaacgggttctatcacttccgt

SEQ ID NO: 338 - DNA, 812 bp, Providencia rustigianii
  ref <308>: DATABASE ACCESSION NUMBER: ATCC 33673
agcgtaccaaaagtgtacgatgctcttgaggttattaacggtaaagaaaaactggtgttggaagttcagcagcagttaggcggtggtgttgtccgttgtatcgcaatgggtacatcagatggtctgagccgtggtttagaagttgtaaacttagaacacccaattgaagtaccagtaggtaaagcaactctgggacgtatcatgaacgttctgggtgaccctattgatatgaaaggtgatatcggcgaagaagagcgctggtctattcaccgttcagcgccaagctatgaagaattagctaactcaacagaactgctagaaaccggtatcaaagtaatggacttaatctgtccattcgcgaaaggtggtaaagttggtctgttcggtggtgcgggtgttggtaaaacagtaaacatgatggaactgatccgtaacatcgcgattgagcactcaggttactcagtattcgctggtgttggtgagcgtacccgtgaaggtaacgacttctatcatgaaatgactgattctaacgttctggataaagtatcactggtttatggccagatgaacgagccaccaggaaaccgtctgcgtgttgcgctgactggtctgactatggctgaaaaattccgtgacgaaggtcgtgacgtactgctgttcgttgacaacatttatcgttatacactggcaggtactgaagtatcagcactgttaggtcgtatgccttcagcggtaggttatcagccaacattggcagaagagatgggtgttctacaagaacgtatcacttctaccaaaaccggttctatcac

SEQ ID NO: 339 - DNA, 819 bp, Providencia stuartii
  ref <308>: DATABASE ACCESSION NUMBER: ATCC 33672
tcaagatgcagtaccaaaagtgtacgatgcgcttgaggttgttaacggtaaagaaaaactggtgctggaagttcagcaacagttaggcggtggtgttgtccgttgtatcgcaatgggtacatcagatggcctaagccgtggtttagaagttaaaaatttagaacacccaattgaagtaccagtaggtaaagcaacactcggacgtatcatgaacgttctgggtgaccctattgatatgaaaggtgatatcggcgaagaagagcgttggtctattcaccgcgctgcaccaagctacgaagagctatcgagctcaactgaactgctagagacaggtatcaaagtcatggacttgatctgtccattcgcgaaaggtggtaaagttggtctgttcggtggtgcgggtgttggtaaaacggtaaacatgatggaacttatccgtaacatcgcgattgagcactcaggttactcagtattcgcaggtgttggtgagcgtacccgtgaaggtaacgacttctatcatgaaatgacagattcaaacgttcttgacaaagtatcactggtttatggtcagatgaatgagccaccaggaaaccgtctacgcgtagcattgactggtttgactatggctgagaaattccgtgacgaaggccgtgatgttctgttgttcgtggataacatctatcgttatacactggcaggtacagaagtatcggctctgttaggtcgtatgccatcagcagtaggttatcagccaacattggcagaagagatgggtgttcttcaagaacgtatcacttctactaagacaggttctatcac

SEQ ID NO: 340 - DNA, 857 bp, Psychrobacter phenylpyruvicus
  ref <308>: DATABASE ACCESSION NUMBER: ATCC 23333
aaccgcactgacgtgcctcaaatttatgacgcgttagttgtagatggtaccgaaaccaccctagaagttcagcagcagctgggcgatggtgtggtacgtactattgcaatgggatctactgaaggtcttaagcgtggtttaccagtaacaaacactggtgccccaattacagttccagtaggtgatgcgactttaggtcgtattatggacgttttaggtcgtccaattgacgaacaaggtccagttaattctgaagaccattggtcaatccaccgtcaagcgccatcatatgatgagcaagctaacagtactgacctattagagacaggtattaaagtaattgacttactttgtccgttcgctaaagggggtaaagttggtctgttcggtggtgccggtgttggtaaaaccgtaaacatgatggaattgattaataacatcgctcttaagcactcaggtttatcagtattcgctggtgtgggtgagcgtactcgtgaaggtaacgacttctaccacgagatgcaagaagcgggtgttgttgacgttgaaaacttcaccaactcaaaagttgcgatggtttatggtcagatgaatgagccaccaggtaaccgtttacgtgttgcgttaaccggtctgactatggctgagtacttccgtgatcaaaaagatgaaaacggtaaaggtaaagacgttctattattcgttgataacatctaccgctacacgctagccggtactgaagtatcagcacttctaggtcgtatgccatcagcagtaggttatcagccaacactagcggaagagatgggtgtactacaagagcgtattacttcaactcagactggttctattacttc

SEQ ID NO: 341 - DNA, 832 bp, Rahnella aquatilis
  DSM 4594
gttccctcaggatgcagtaccgaacgtgtacaatgctcttgaggtagaaaacggtacctccaaactggtgctggaagttcagcaacagttaggcggcggcgttgttcgttgtatcgcaatgggtacctcagacggcctgcgtcgcggtctgaaagtgaacaacctggaacacccaattgaagtaccggtaggtaaagcgactctgggtcgtatcatgaacgtattgggtgaaccaatcgacatgaaaggtgaaatcggcgaagaagaacgtcgtgctattcaccgtgctgcgccttcttatgaagagctggcaaactcccaggaattgctggaaaccggtatcaaagttatggacctgatgtgtccgttcgctaagggcggtaaagttggtctgttcggtggtgcgggtgtaggtaaaactgtgaacatgatggagctgatccgtaacattgcgatcgagcactccggttattctgtgtttgcaggcgtgggtgaacgtactcgtgagggtaacgacttctaccacgaaatgactgattccaacgttatcgacaaagtttccctggtgtatggccagatgaatgagccaccaggtaaccgtctgcgcgttgcactgaccggcctgaccatggcggaaaaattccgtgatgaaggtcgtgacgtactgctgttcgttgacaacatttaccgttacaccctggccggtaccgaagtgtccgcacttctgggccgtatgccatcggcggtaggttatcagccaacgctggcggaagagatgggcgctctgcaagaacgtatcacctcgaccaaaagtggttctatcacctccgta

SEQ ID NO: 342 - DNA, 824 bp, Salmonella choleraesuis subsp. arizonae
  ref <308>: DATABASE ACCESSION NUMBER: ATCC 13314
ttccctcaggatgccgtaccacgcgtgtacgatgctcttgaggtgcagaatggtaatgagaagctggtgctggaagttcagcagcagcttggcggcggtatcgtgcgtaccatcgcgatggggtcttctgacggtctgcgtcgcggtcttgatgtaaaagatctcgaacacccgatcgaagtcccggtaggtaaagccacgctgggtcgtatcatgaacgtcctgggcgaaccggtcgatatgaaaggcgagatcggcgaagaagagcgttgggctattcaccgcgcggcgccgtcctacgaagagttgtcaaactctcaggaactgctggaaaccggtataaaagttatcgacctgatgtgtccgttcgcgaagggcggtaaagtcggtctgttcggtggcgcgggtgtaggtaaaaccgtaaacatgatggagcttatccgtaacatcgcgatcgagcactccggttactctgtgtttgcgggcgtaggtgaacgtactcgtgagggtaacgacttctaccacgaaatgaccgactctaacgttatcgataaagtatccctggtgtatggccagatgaacgagccaccgggaaaccgtctgcgcgttgcattgaccggcctgaccatggcggaaaaattccgtgatgaaggtcgtgacgttctgctgttcgtcgacaacatctaccgttataccctcgccggtacggaagtatccgcactgctgggtcgtatgccttccgcggtaggttaycasccgactctggcggaagagatgggcgttctgcaggaacgtatcacctccaccaaaaccggttctatcac

SEQ ID NO: 343 - DNA, 820 bp, Salmonella choleraesuis subsp. choleraesuis
  ref <308>: DATABASE ACCESSION NUMBER: ATCC 7001
gatgccgtaccacgcgtgtacgatgcccttgaggtgcagaatggtaatgagaagctggtgctggaagttcagcagcagcttggcggcggtatcgtgcgtaccatcgcgatggggtcttctgacggtctgcgtcgcggtctggatgtaaaagatctcgaacacccgatcgaagtcccggtaggtaaagccacgctgggtcgtatcatgaacgtcctgggcgaaccggtcgacatgaaaggcgagatcggcgaagaagagcgttgggcgattcaccgcgcagcaccttcctacgaagagttgtcaaactctcaggaactgctggaaaccggtatcaaagttatcgacctgatgtgtccgttcgcgaagggcggtaaagtcggtctgttcggtggtgcgggtgtaggtaaaaccgtaaacatgatggagcttattcgtaacatcgcgatcgagcactccggttactcagtgtttgcgggcgtaggggaacgtactcgtgagggtaacgacttctaccacgaaatgaccgactccaacgttatcgataaagtatccctggtgtatggccagatgaacgagccgccgggaaaccgtctgcgcgttgcactgaccggcctgaccatggcggagaaattccgtgacgaaggtcgtgatgtactgctgttcgtcgataacatctatcgttacaccctggccggtacggaagtatccgcactgctgggccgtatgccttccgcagtaggttaccagccgactctggcggaagagatgggcgttctgcaggaacgtatcacctccaccaaaaccggttctatcacctccg

SEQ ID NO: 344 - DNA, 831 bp, Salmonella choleraesuis subsp. diarizonae
  ref <308>: DATABASE ACCESSION NUMBER: ATCC 43973
ttccctcaggatgccgtaccacgcgtgtacgatgctcttgaggtgcagaatggtaatgagaagctggtgctggaagttcagcagcagcttggcggcggtatcgtgcgtaccatcgcgatggggtcttctgacggtctgcgtcgcggtcttgatgtaaaagatctcgaacacccgatcgaagtcccggtaggtaaagcaacgctgggtcgtatcatgaacgtcctgggtgaaccggtcgatatgaaaggcgagatcggcgaagaagagcgttgggcgattcaccgcgcggcgccgtcctacgaagagttgtcaaactctcaggaactgctggaaaccggtatcaaagttatcgacctgatgtgtccgttcgcgaagggcggtaaagtcggtctgttcggtggcgcgggtgtaggtaaaaccgtaaacatgatggagcttatccgtaacatcgcgatcgagcactccggttactctgtgtttgcgggcgtaggtgaacgtactcgtgagggtaacgacttctaccacgaaatgaccgactctaacgttatcgataaagtatccctggtgtatggccagatgaacgagccaccgggaaaccgtctgcgcgttgcattgaccggcctgaccatggcggaaaaattccgtgatgaaggtcgtgacgttctgctgttcgtcgacaacatctaccgttataccctcgccggtacggaagtatccgcactgctgggtcgtatgccttccgcggtaggttatcagccgactctggctgaagaaatgggcgttctgcaggaacgtatcacctccaccaaaaccggttctatcacctccgta

SEQ ID NO: 345 - DNA, 831 bp, Salmonella choleraesuis subsp. houtenae
  ref <308>: DATABASE ACCESSION NUMBER: ATCC 43974
ttccctcaggatgccgtaccacgcgtgtacgatgctcttgaggtgcagaatggtaatgagaagctggtgctggaagttcagcagcagcttggcggcggtatcgtacgtaccatcgcgatggggtcttctgacggtctgcgtcgcggtctggatgtaaaagatctcgaacacccgatcgaagtcccggtaggtaaagctacgctgggtcgtatcatgaacgtcctgggcgaaccggtcgatatgaaaggcgagatcggcgaagaagagcgttgggcgattcaccgcgctgcgccgtcctacgaagagttgtcaaactctcaggaactgctggaaaccggtatcaaagttatcgacctgatgtgtccgttcgcgaagggcggtaaagtcggtctgttcggtggcgcgggtgtaggtaaaaccgtaaacatgatggagcttatccgtaacatcgcgatcgagcactccggttactccgtgtttgcgggcgtaggtgaacgtactcgtgagggtaacgacttctaccacgaaatgaccgactccaacgttatcgataaagtatccctggtgtatggtcagatgaacgagccgccgggaaaccgtctgcgcgttgcattgaccggcctgaccatggcggaaaaattccgtgacgaaggtcgtgacgttctgctgttcgtcgataacatctatcgttacaccctggccggtacggaagtatccgcactgctgggtcgtatgccttccgcggtaggttatcagccgacgctggcggaagagatgggcgttctgcaggaacgtatcacctccaccaagaccggttctatcacctccgta

SEQ ID NO: 346 - DNA, 829 bp, Salmonella choleraesuis subsp. indica
  ref <308>: DATABASE ACCESSION NUMBER: ATCC 43974
ttccctcaggatgccgtaccacgcgtgtacgatgcccttgaggtgcagaatggtaatgagaagctcgtgctggaagttcagcagcagcttggcggcggtatcgtgcgtaccatcgcgatggggtcttctgacggtctgcgtcgcggtctggatgtaaaagatctcgaacacccgatcgaagtcccggtaggtaaagccacgctgggtcgtatcatgaacgtcctgggcgaaccggtcgatatgaaaggcgagatcggcgaagaagagcgttgggcgattcaccgcgcggcgccgtcctatgaagagttgtcaaactctcaggaactgctggaaaccggtatcaaagttatcgacctgatgtgtccgttcgcgaagggcggtaaagtcggtctgttcggtggtgcgggcgtaggtaaaaccgtaaacatgatggagcttatccgtaacatcgcgatcgagcactccggttactctgtgtttgcgggcgtaggtgaacgtactcgtgagggtaacgacttctaccacgaaatgaccgactccaacgttatcgacaaagtatccctggtgtatggccagatgaacgagccgccgggaaaccgtctgcgcgttgcactgaccggcctgaccatggcggagaagttccgtgacgaaggtcgtgacgtactgctgttcgtcgataacatctatcgttataccctggccggtacggaagtttccgcactgctgggtcgtatgccttccgcggtaggttatcagccaactctggcggaagagatgggcgttctgcaggaacgtatcacctccaccaaaaccggttctatcacctccg

SEQ ID NO: 347 - DNA, 817 bp, Salmonella choleraesuis subsp. choleraesuis
  ref <308>: DATABASE ACCESSION NUMBER: ATCC 9150
gccgtaccacgcgtgtacgatgcccttgaggtgcagaatggtaatgagaagctggtgctggaagttcagcagcagcttggcggcggtatcgtgcgtaccatcgcgatggggtcttctgacggtctgcgtcgcggtctggatgtaaaagatctcgaacacccgatcgaagtcccggtaggtaaagctacgctgggtcgtatcatgaacgtcctgggcgaaccggtcgacatgaaaggcgagatcggcgaagaagagcgttgggcgattcaccgcgcagcgccttcctacgaagagttgtcaaactctcaggaactgctggaaaccggtatcaaagttatcgacctgatgtgtccgttcgcgaagggcggtaaagtcggtctgttcggtggtgcgggtgtaggtaaaaccgtaaacatgatggagcttatccgtaacatcgcgatcgagcactccggttactctgtgtttgcgggcgtaggtgaacgtactcgtgagggtaacgacttctaccatgaaatgaccgactccaacgttatcgataaagtatccctggtgtatggccagatgaacgagccgccgggaaaccgtctgcgcgttgcactgaccggcctgaccatggcggagaaattccgtgacgaaggtcgtgacgtactgctgttcgtcgataacatctatcgttacaccctggccggtacggaagtatccgcactgctgggtcgtatgccttccgcggtaggttaccagccgactctggcggaagagatgggcgttctgcaggaacgtatcacctccaccaagaccggttctatcacctccg

SEQ ID NO: 348 - DNA, 806 bp, Salmonella choleraesuis subsp. choleraesuis
  ref <308>: DATABASE ACCESSION NUMBER: ATCC 8759
gccgtaccacgcgtgtacgatgcccttgaggtgcagaatggtaatgagaagctggtgctggaagttcagcagcagcttggcggcggtattgtgcgtaccatcgcgatggggtcttctgacggtctgcgtcgcggtctggatgtaaaagatctcgaacacccgatcgaagtcccggtaggtaaagccacgctgggtcgtatcatgaacgtcctgggcgaaccggtcgacatgaaaggcgagatcggcgaagaagagcgttgggcgattcaccgcgcagcgccttcctacgaagagttgtcaaactctcaggaactgctggaaaccggtatcaaagttatcgacctgatgtgtccgttcgcgaagggcggtaaagtcggtctgttcggtggtgcgggtgtgggtaaaaccgtaaacatgatggagcttatccgtaacatcgcgatcgagcactccggttactctgtgtttgcgggcgtaggtgaacgtactcgtgagggtaacgacttctaccacgaaatgaccgactccaacgttatcgataaagtatccctggtgtatggccagatgaacgagccgccgggaaaccgtctgcgcgttgcattgaccggtctgaccatggcggagaaattccgtgacgaaggtcgtgacgtactgctgttcgtcgataacatctatcgttacaccctggccggtacggaagtatccgcactgctgggccgtatgccttccgcagtaggttaccagccgactctggcggaagagatgggcgttctgcaggaacgtatcacctccaccaaaaccggttc

SEQ ID NO: 349 - DNA, 831 bp, Salmonella choleraesuis subsp. salamae
  ref <308>: DATABASE ACCESSION NUMBER: ATCC 43972
ttccctcaggatgccgtaccacgcgtgtacgatgcccttgaggtgcagaatggtaatgagaagctggtgctggaagttcagcagcagcttggcggcggtatcgtgcgtaccatcgcgatggggtcttctgacggtctgcgtcgkggtctggatgtaaaagatctcgaacacccgatcgaagtcccggtaggtaaagcaacgctgggccgtatcatgaacgtactgggcgaaccggtcgacatgaaaggcgagattggtgaagaagagcgttgggctattcaccgtgctgcgccgtcctacgaagagttgtcaaactctcaggaactgctggaaaccggtatcaaagttatcgacctgatgtgtccgttcgcgaagggcggtaaagtcggtctgttcggtggcgcgggtgtaggtaaaaccgtaaacatgatggagctcatccgtaacatcgcgatcgagcactccggttactccgtgtttgcgggcgtaggtgaacgtactcgtgagggtaacgacttctaccacgaaatgaccgactccaacgttatcgataaagtatccctggtgtatggccagatgaacgagccgccgggaaaccgtctgcgcgttgcactgaccggcctgaccatggcggaaaaattccgtgacgaaggtcgtgacgtactgctgttcgtcgataacatctatcgttataccctggccggtacggaagtatccgcactgctgggtcgtatgccttccgcggtaggttatcagccgacgctggcggaagagatgggcgttctgcaggaacgtatcacctccactaaaaccggttctatcacctccgta

SEQ ID NO: 350 - DNA, 823 bp, Salmonella choleraesuis subsp. choleraesuis
  ref <308>: DATABASE ACCESSION NUMBER: ATCC 10749
ttccctcaggatgccgtaccacgcgtgtacgatgcccttgaggtgcagaatggtaatgagaagctggtgctggaagttcagcagcagcttggcggcggtatcgtgcgtaccatcgcgatggggtcttctgacggtctgcgtcgcggtctggatgtaaaagatctcgaacacccgatcgaagtcccggtaggtaaagctacgctgggtcgtatcatgaacgtcctgggcgaaccggtcgacatgaaaggcgagatcggcgaagaagagcgttgggcgattcaccgcgcagcgccttcctacgaagagttatcaaactctcaggaactgctggaaaccggtatcaaagttatcgacctgatgtgtccgttcgcgaagggcggtaaagtcggtctgttcggtggtgcgggtgtaggtaaaaccgtaaacatgatggagcttatccgtaacatcgcgatcgagcactccggttactctgtgtttgcgggcgtaggtgaacgtactcgtgagggtaacgacttctaccatgaaatgaccgactccaacgttatcgataaagtatccctggtgtatggccagatgaacgagccgccgggaaaccgtctgcgcgttgcactgaccggcctgaccatggcggagaaattccgtgacgaaggtcgtgacgtactgctgttcgtcgataacatctatcgttacaccctggccggtacggaagtatccgcactgctgggtcgtatgccttccgcggtaggttaccagccgactctggcggaagagatgggcgttctgcaggaacgtatcacctccaccaagaccggttctatca

SEQ ID NO: 351 - DNA, 823 bp, Salmonella choleraesuis subsp. choleraesuis; identical to SEQ ID NO: 350
  ref <308>: DATABASE ACCESSION NUMBER: ATCC 14028

SEQ ID NO: 352 - DNA, 810 bp, Salmonella choleraesuis subsp. choleraesuis
  ref <308>: DATABASE ACCESSION NUMBER: ATCC 51955
gccgtaccacgcgtgtacgatgcccttgaggtgcagaatggtaatgagaagctggtgctggaagttcagcagcagcttggcggcggtatcgtgcgtaccatcgcgatggggtcttctgacggtctgcgtcgcggtctggatgtaaaagatctcgaacacccgatcgaagtcccggtaggtaaagccacgctgggtcgtatcatgaacgtcctgggcgaaccggtcgacatgaaaggcgagatcggcgaagaagagcgttgggcgattcaccgcgcagcaccttcctacgaagagttgtcaaactctcaggaactgctggaaaccggtatcaaagttatcgacctgatgtgtccgttcgcgaagggcggtaaagtcggtctgttcggtggtgcgggtgtaggtaaaaccgtaaacatgatggagcttattcgtaacatcgcgatcgagcactccggttactctgtgtttgcgggcgtaggggaacgtactcgtgagggtaacgacttctaccacgaaatgaccgactccaacgttatcgataaagtctccctggtgtatggccagatgaacgagccgccgggaaaccgtctgcgcgttgcattgaccggtctgaccatggcggagaaattccgtgacgaaggtcgtgacgtactgctgttcgtcgataacatctatcgttacaccctggccggtacggaagtatccgcactgctgggccgtatgccttccgcagtaggttaccagccgactctggcggaagagatgggcgttctgcaggaacgtatcacctccaccaaaaccggttctatc

SEQ ID NO: 353 - DNA, 820 bp, Serratia ficaria
  ref <308>: DATABASE ACCESSION NUMBER: ATCC 33105
gatgccgtaccaaaagtgtacgatgcccttgaggtagaaaacggtaccgagaaactggtgctggaagttcagcagcagctgggcggtggcgtcgttcgctgtatcgcaatggggacctctgacggtctgcgtcgcggtctgaaagtgaacaacctggaacacccgattgaagtgccggtgggtaaagctaccctgggccgtatcatgaacgtattgggcgaaccaatcgacatgaaaggcgagatcggcgaagaagagcgttgggcgattcaccgtcctgcgccaagctacgaagagctgtccaactcccaggacctgctggaaaccggtatcaaggtaatggacctgatttgtccgttcgccaagggcggtaaagtcggtctgttcggtggtgcgggcgtgggcaaaaccgtaaacatgatggagctgatccgtaacatcgcgatcgagcactccggttattccgtgtttgcgggcgtgggcgagcgtactcgtgagggtaacgacttctaccacgaaatgaacgactccaacgttctggacaaagtatccctggtttacggccagatgaacgagccgccgggtaaccgtctgcgcgttgcattgaccggcctgaccatggcggagaaattccgtgacgaaggccgcgacgttctgctgttcgttgacaacatttaccgttacaccctggccggtaccgaagtgtccgcacttctgggccgtatgccatccgcggtaggttatcagccaacgctggcggaagagatgggcgttctgcaagaacgtatcacctcgaccaagaccggttccatcacctccg

SEQ ID NO: 354 - DNA, 816 bp, Serratia fonticola
  ref <308>: DATABASE ACCESSION NUMBER: ATCC 29844
gatgccgtaccgaaagtgtacaacgctcttgaggttgcaaacggcaccgagaaattggtgctggaagttcagcaacagctgggtggcggcgtggttcgctgtatcgcaatggggacctcagacggtctgcgtcgtggtctggccgtaaccgacctgcagcacccaattgaagtaccggtaggtaaagctaccctgggccgtatcatgaacgtattgggtgaaccaatcgacatgaagggcgacatcggcgaagaagaacgttgggctattcaccgccctgcgccaagctacgaagagctgtccagctcccaggatctgctggaaaccggtatcaaggtaatggacctgatctgcccgttcgccaagggtggtaaagttggtctgttcggtggtgctggtgtaggtaaaaccgtaaacatgatggagctgatccgtaacatcgcgatcgagcactccggttattctgtgtttgcgggcgtgggtgaacgtactcgtgagggtaacgacttctaccacgaaatgaccgattccaacgtactggacaaagtttccctggtttacggccagatgaacgagccaccaggtaaccgtctgcgcgttgcgctgaccggcctgaccatggctgagaagttccgtgacgaaggtcgtgacgtactgctgttcgtcgataacatctaccgttataccctggccggtaccgaagtgtccgcacttctgggccgtatgccatcggcggtaggttatcagccaacgctggcggaagagatgggtgttctgcaagaacgtatcacctctaccaagactggttcaatcacc

SEQ ID NO: 355 - DNA, 822 bp, Serratia grimesii
  ref <308>: DATABASE ACCESSION NUMBER: ATCC 14460
gatgccgtaccaaaagtgtacaacgctcttgaggtagaaaacggtgccaataagctggtgctggaagttcagcaacagttgggcggtggcgtggttcgctgtatcgcaatggggacctctgatggtctgcgtcgcggtctgaaagtcacagacctggaccacccaattgaagtaccggtaggtaaagctactctgggccgtatcatgaacgtattgggtgaaccaatcgacatgaagggcgatatcggcgaagaagaacgttgggcgattcaccgtccggcgccaagctacgaagatttggccaactcccaggatctgctggaaaccggtatcaaggtaatggacctgatctgcccgttcgccaagggtggtaaagtcggtctgttcggtggtgcgggtgttggtaaaaccgtaaacatgatggagctgatccgtaacatcgcgatcgagcactccggttattctgtgtttgcgggcgtgggtgagcgtactcgtgagggtaacgacttctaccacgaaatgaacgactccaacgtactggacaaagtatccctggtttacggccagatgaacgagccaccgggtaaccgtctgcgcgttgctctgaccggtctgaccatggctgagaaattccgtgacgaaggccgtgacgttctgctgttcgttgataacatctaccgttataccctggccggtaccgaagtgtccgcacttctgggccgtatgccatcggcggtaggttatcagccaacgctggcggaagagatgggtgttctgcaagaacgtatcacctctaccaagactggttcaatcacctccgta

SEQ ID NO: 356 - DNA, 819 bp, Serratia liquefaciens
  ref <308>: DATABASE ACCESSION NUMBER: ATCC 27592
atgccgtaccaaaagtgtacaatgctcttgaggtagaaaacggtaccgagaagctggtgctggaagttcagcagcagttgggcggtggcgtagttcgctgtatcgcgatggggacctcagatggtctgcgccgcggtctgaaagtgaacgatctggaacacccaattgaagtaccggtaggtaaagctaccctgggccgtatcatgaacgtattgggtgaaccaatcgacatgaaaggcgacatcggcgaagaagaacgttgggcgattcaccgtccagcgccaagctacgaagatttgtcaaactcccaggatctgctggaaaccggtatcaaggttatggacctgatttgtccgttcgctaagggcggtaaagttggtctgttcggtggtgctggtgttggtaaaaccgtaaacatgatggagctgatccgtaacatcgcgatcgagcactccggttattccgtgtttgcaggcgtgggtgagcgtactcgtgagggtaacgacttctaccacgaaatgaacgactccaacgtactggacaaagtatccctggtttacggccagatgaacgagccaccgggtaaccgtctgcgcgttgctctgaccggtctgaccatggcggagaaattccgtgacgaaggccgcgacgttctgctgttcgttgataacatttaccgttataccctggccggtaccgaagtgtccgcacttctgggccgtatgccatctgcggtaggttatcagccaacgctggcggaagagatgggcgttctgcaagaacgtatcacctctaccaagaccggttctatcacttccg

SEQ ID NO: 357 - DNA, 805 bp, Serratia marcescens
  ref <308>: DATABASE ACCESSION NUMBER: ATCC 13880
tcaggatgccgtaccgaaagtgtacgacgcccttgaggtagaaaacggcaccgaaaaactggtgttggaagttcagcaacagctgggcggtggcgtggttcgctgtatcgcaatggggacctccgacggtctgcgtcgcggtctgaaagtgaacaacctggaccacccgattgaagtgccggtgggtaaagctaccctgggtcgtatcatgaacgtattgggtcaaccgatcgacatgaaaggcgacatcggcgaagaagagcgttgggcgattcaccgcgcggcgccaagctacgaagagctgtcaagctctcaggaactgctggaaaccggtatcaaggtaatggacctgatttgtccgttcgccaagggcggtaaagtcggtctgttcggcggtgcgggcgtaggtaaaaccgtaaacatgatggagctgatccgtaacatcgcgatcgagcactccggttattccgtgtttgcgggcgtgggcgagcgtactcgtgagggtaacgacttctaccacgaaatgaccgactccaacgttctggacaaagtatccctggtttacggccagatgaacgagccaccaggtaaccgtctgcgcgttgcgctgaccggtctgaccatggcggagaaattccgtgacgaaggccgtgacgttctgctgttcgttgacaacatctaccgttacaccctggccggtaccgaagtgtccgcacttctgggccgtatgccatccgcggtaggttatcagccaacgctggcggaagagatgggcgttctgcaagaacgtatcacctcgaccaag

SEQ ID NO: 358 - DNA, 822 bp, Serratia odorifera
  ref <308>: DATABASE ACCESSION NUMBER: ATCC 33077
gatgccgtaccaaaagtgtacgatgcccttgaggtagaaaacggtaccgaaactctggtgctggaagttcagcagcagctgggcggtggcgtggttcgttgtatcgctatgggcacctccgacggtttgcgtcgcggcctgaaagtgaacgatctgcaacacccaatcgaagtcccggttggcaaggcaacgctgggtcgtatcatgaacgtattgggtcaaccaatcgacatgaaaggcgacatcggcgaagaagagcgttgggcgattcaccgcgcggcgccaagctacgaagaactgtccaactcccaggatctgctggaaaccggtatcaaggttatggacctgatctgcccgtttgccaagggtggtaaagtcggtctgttcggtggtgcgggtgttggtaaaaccgtaaacatgatggagctgatccgtaacatcgcgatcgagcactccggttattcagtgtttgcgggcgtgggtgagcgtactcgtgagggtaacgacttctaccacgaaatgaccgactccaacgtactggacaaggtttccctggtttacggccagatgaacgagccaccgggtaaccgtctgcgcgttgcgctgaccggtctgaccatggccgagaaattccgtgacgaaggtcgtgacgttctgctgttcgttgacaacatttaccgttacaccctggccggtaccgaagtgtctgcacttctgggccgtatgccatcggcggtaggttatcagccaacgctggcggaagagatgggcgttctgcaagaacgtatcacctcgaccaagaccggttctatcacctccgta

SEQ ID NO: 359 - DNA, 805 bp, Serratia plymuthica
  ref <308>: DATABASE ACCESSION NUMBER: ATCC 183
gtgtacaacgctcttgaggtagaaaacggtgccaataagctggtgctggaagttcagcaacagctgggcggtggcgtggttcgctgtatcgcgatggggacctctgatggtctgcgtcgcggtctgaaagtgatcgacctggatcacccgattgaagtaccggtaggtaaagctaccctgggccgtatcatgaacgtattgggtgaaccaatcgacatgaaaggcgacatcggcgaagaagaacgttgggcaattcaccgtccagcgccaagctacgaagatttggccaactcccaggatctgctggaaaccggtatcaaggttatggacctgatctgtccgttcgctaagggcggtaaagtgggtctgttcggcggtgcgggcgtgggtaaaaccgtaaacatgatggagctgatccgtaacatcgcgatcgaacactccggttattccgtgtttgcgggcgtgggtgagcgtactcgtgagggtaacgacttctaccacgaaatgaacgactccaacgtactggacaaagtatccctggtttacggccagatgaacgagccaccgggtaaccgtctgcgcgttgctctgaccggtctgaccatggcggagaaattccgtgacgaaggccgcgacgttctgctgttcgttgataacatctaccgttataccctggccggtaccgaagtgtccgcacttctgggccgtatgccatctgcggtaggttatcagccaacgctggcggaagagatgggcgttctgcaagaacgtatcacctctaccaagaccggttctatcacctccg

SEQ ID NO: 360 - DNA, 831 bp, Serratia rubidaea
  ref <308>: DATABASE ACCESSION NUMBER: ATCC 27593
ttccctcaggatgccgtaccaaaagtgtacgatgcccttgaggtagagaacggtaacgaaaaactggtgctggaagttcagcagcagctgggcggcggcgttgtacgctgtatcgccatgggtacttccgacggtctgcgtcgcggtctgaaagttaacgacctcgagcacccaatcgaagtgccagttggtaaagcaacgctgggtcgtatcatgaacgtattgggtcagccaatcgacatgaaaggcgacatcggcgaagaagagcgttgggcgattcaccgcgcggcgccaagctacgaagagctgtccagctcccaagagctgctggaaaccggtatcaaggtaatggacctgatctgcccgttcgccaagggtggtaaagttggtctgttcggtggtgcgggcgtaggtaaaaccgtaaacatgatggagctgatccgtaacatcgcgatcgagcactccggttactctgtgtttgcgggcgtgggtgagcgtactcgtgagggtaacgacttctaccacgaaatgaccgactccaacgtactggacaaagtatccctggtttacggccagatgaacgagccgccgggtaaccgtctgcgcgttgcactgaccggcctgaccatggcggaaaaattccgtgatgaaggccgcgacgttctgctgttcgtggataacatctaccgttacaccctggccggtaccgaagtgtccgcactgctcggccgtatgccatctgcggtaggttatcagccaacgctggcggaagagatgggcgttctgcaagaacgtatcacctcgaccaagaccggttcaatcacctccgta

SEQ ID NO: 361 - DNA, 831 bp, Pseudomonas putida
  strain LCDC7172
ttccctcaggatgccgtaccgcgcgtgtacgatgctcttgaggtgcaaaatggtaatgagcgtctggtgctggaagttcagcagcagctcggcggcggtatcgtgcgtaccatcgcaatgggttcctccgacggtctgcgtcgcggtctggatgtaaaagacctcgaacacccgatcgaagtcccggtaggtaaagcgactctgggccgtatcatgaacgtactgggtgaaccggtcgacatgaaaggcgagatcggtgaagaagagcgttgggcgattcaccgcgcagcaccttcctacgaagagctgtcaaactctcaggaactgctggaaaccggtatcaaagttatcgacctgatgtgtccgttcgctaagggcggtaaagttggtctgttcggtggtgcgggtgtaggtaaaaccgtaaacatgatggagctcattcgtaacatcgcgatcgagcactccggttactctgtgtttgcgggcgtaggtgaacgtactcgtgagggtaacgacttctaccacgaaatgaccgactccaacgttatcgacaaagtatccctggtgtatggccagatgaacgagccgccgggaaaccgtctgcgcgttgctctgaccggtctgaccatggctgagaaattccgtgacgaaggtcgtgacgttctgctgttcgttgacaacatctatcgttacaccctggccggtacggaagtatccgcactgctgggccgtatgccttcagcggtaggttatcagccgaccctggcggaagagatgggcgttctgcaggaacgtatcacctccaccaaaactggttctatcacctccgta

SEQ ID NO: 362 - DNA, 831 bp, Shigella boydii; identical to SEQ ID NO: 361
  ref <308>: DATABASE ACCESSION NUMBER: ATCC 9207

SEQ ID NO: 363 - DNA, 802 bp, Shigella dysenteriae
  ref <308>: DATABASE ACCESSION NUMBER: ATCC 11835
gccgtaccgcgcgtgtacgatgctcttgcggtgcaaaatggtaatgagcgtctggtgctggaagttcagcagcagctcggcggcggtatcgtgcgtaccatcgcaatgggttcctccgacggtctgcgtcgcggtctggatgtaaaagacctcgaacacccgatcgaagtcccggtaggtaaagcgactctgggccgtatcatgaacgtactgggtgaaccggtcgacatgaaaggcgagatcggtgaagaagagcgttgggctattcaccgcgcagcaccttcctacgaagagctgtcaaactctcaggaactgctggaaaccggtatcaaagttatcgacctgatgtgtccgttcgctaagggcggtaaagttggtctgttcggtggtgcgggtgtaggtaaaaccgtaaacatgatggagctcattcgtaacatcgcgatcgagcactccggttactctgtgtttgcgggcgtaggtgaacgtactcgtgagggtaacgacttctaccacgaaatgaccgactccaacgttatcgacaaagtatccctggtgtatggccagatgaacgagccgccgggaaaccgtctgcgcgttgctctgaccggtctgaccatggctgagaaattccgtgacgaaggtcgtgacgttctgctgttcgttgacaacatctatcgttacaccctggccggtacggaagtatccgcactgctgggccgtatgccttcagcggtaggttatcagccgaccctggcggaagagatgggcgttctgcaggaacgtatcacctccaccaaaaccg

SEQ ID NO: 364 - DNA, 819 bp, Shigella flexneri
  ref <308>: DATABASE ACCESSION NUMBER: ATCC 12022
atgccgtaccgcgcgtgtacgatgctcttgaggtgcaaaatggtaatgagcgtctggtgctggaagttcagcagcagctcggcggcggtatcgtgcgtaccatcgcaatgggttcctccgacggtctgcgtcgcggtctggatgtaaaagacctcgaacacccgatcgaagtcccggtaggtaaagcgactctgggccgtatcatgaacgtactgggtgaaccggtcgacatgaaaggcgagatcggtgaagaagagcgttgggcgattcaccgcgcagcaccttcctacgaagagctgtcaaactctcaggaactgctggaaaccggtatcaaagttatcgacctgatgtgtccgttcgctaagggcggtaaagttggtctgttcggtggtgcgggtgtaggtaaaaccgtaaacatgatggagctcattcgtaacatcgcgatcgagcactccggttactctgtgtttgcgggcgtaggtgaacgtactcgtgagggtaacgacttctaccacgaaatgaccgactccaacgttatcgacaaagtatccctggtgtatggccagatgaacgagccgccgggaaaccgtctgcgcgttgctctgaccggtctgaccatggctgagaaattccgtgacgaaggtcgtgacgttctgctgttcgttgacaacatctatcgttacaccctggccggtacggaagtatccgcactgctgggccgtatgccttcagcggtaggttatcagccgaccctggcggaagagatgggcgttctgcaggaacgtatcacctccaccaaaactggttctatcacctccg

SEQ ID NO: 365 - DNA, 802 bp, Shigella sonnei
  ref <308>: DATABASE ACCESSION NUMBER: ATCC 29930
gtaccgcgcgtgtacgatgctcttgaggtgcaaaatggtaatgagcgtctggtgctggaagttcagcagcagctcggcggcggtatcgtgcgtaccatcgcaatgggttcctccgacggtctgcgtcgcggtctggatgtaaaagacctcgaacacccgatcgaagtcccggtaggtaaagcgactctgggccgtatcatgaacgtactgggtgaaccggtcgacatgaaaggcgagatcggtgaagaagagcgttgggcgattcaccgcgcagcaccttcctacgaagagctgtcaaactctcaggaactgctggaaaccggtatcaaagttatcgacctgatgtgtccgttcgctaagggcggtaaagttggtctgttcggtggtgcgggtgtaggtaaaaccgtaaacatgatggagctcattcgtaacatcgcgatcgagcactccggttactctgtgtttgcgggcgtaggtgaacgtactcgtgagggtaacgacttctaccacgaaatgaccgactccaacgttatcgacaaagtatccctggtgtatggccagatgaacgagccgccgggaaaccgtctgcgcgttgctctgaccggtctgaccatggctgagaaattccgtgacgaaggtcgtgacgttctgctgttcgttgacaacatctatcgttacaccctggccggtacggaagtatccgcactgctgggccgtatgccttcagcggtaggttatcagccgaccctggcggaagagatgggcgttctgcaggaacgtatcacctccaccaaaactggtt

SEQ ID NO: 366 - DNA, 785 bp, Staphylococcus aureus
taacgccttggttattgatgtgcctaaagaagaaggtacaatacaactaacattagaagttgcgctgcaattaggtgacgacgttgttcgtacaattgcgatggattcaactgatggtgtccaaagaggcatggatgtaaaagatacaggcaaagaaattagtgtacctgttggtgatgaaacattaggtcgtgtatttaatgtactaggtgaaacaattgaccttaaagaagaaattagtgattctgttcgccgcgatcctatccatcgtcaagcaccagcattcgatgaactttcaacagaagttcaaattttagaaacaggtattaaagtagtagatttactagcaccttatattaaaggtggtaaaatcggattgttcggtggtgccggtgtaggtaaaacagtattaatccaagaattaattaacaacatcgctcaagagcacggtggtatttctgtattcgccggtgtaggtgaacgtactcgtgaaggtaacgatttatacttcgaaatgagtgatagtggtgtaattaagaaaacagccatggtattcgggcaaatgaatgagccacctggtgcacgtatgcgtgttgcattatctggtttaacaatggctgaatatttccgtgacgaacaaggtcaagacgtattattattcatcgataacattttcagatttacacaagctggttctgaggtatctgcattattaggtcgtatgccttctgcagtaggttaccaaccaacacttgctactgaaatgggacaattacaagaacgta

SEQ ID NO: 367 - DNA, 843 bp, Staphylococcus auricularis
  ref <308>: DATABASE ACCESSION NUMBER: ATCC 33753
gaacataacgaagtgcctaatattaataacgccttagtactcgatgttgaaagagaagacggaacagtgtctttaactttagaagtagctttacaattaggcgatgacgttgttcgtaccattgcaatggattcaactgatggtgttaaacgtggtaacgaagtcaaagatactggtaatagcattagcgtaccagtcggagacgaaactttaggacgtgtcttcaacgttctaggtgaaacaattgatttagaagataaacttgatgattctgcgcgacgtgaccctatacatagagaagcgccagcgtttgatcaattatcaactcaagttgaaattttagaaacaggaattaaagttgttgacttattagcaccttatattaaaggtggtaaagttggactcttcggtggtgccggtgttggtaaaaccgttttaatccaagaattaatcaacaacatcgctcaagaacacggtggtatttcagtctttgccggtgtaggtgaacgtacacgtgaaggtaacgacttgtactatgaaatgagcgacagtggtgtaatcaagaaaacagccatggtcttcggacaaatgaacgaaccacctggcgcacgtatgcgtgttgctttatctggtttaacaatggctgaatatttccgtgatgaacaaggacaagacgtattgttattcatcgacaatattttccgtttcacacaagccggttcagaagtttctgccttactaggtcgtttaccatcagccgttggttatcaacctacattagcaacagaaatgggacaattacaagaacgtattacttcaacaacaaaaggatcagttacttca

SEQ ID NO: 368 - DNA, 849 bp, Staphylococcus capitis subsp. capitis
  ref <308>: DATABASE ACCESSION NUMBER: ATCC 27840
gctttgaacataatgaagttcctgatattaacaatgccttacacatcgaagttcctaaagaagatagcacacttcatttaactttagaagttgcacttcaattaggtgacgatgtagtacgtacaatcgcaatggactcaactgacggcgttcaaagaggtatggaagttaaagatacaggtaaagatattagcgtacctgttggtgatgcaactttaggaagagtatttaacgtattaggagaaacaatcgatttagatgaaaagattgatgattcagtacgtcgtgatcctattcatagacaggcacctggcttcgatgaattatctactaaagtagaaatcttagaaacaggtatcaaagtagtagacttattagcaccttacattaaaggtggtaaaattggattattcggtggtgccggtgttggtaagacagttttaatccaagaacttatcaataatatcgctcaagagcatggtggtatttcagtattcgccggtgttggtgaacgtacacgtgaaggtaacgacctttactatgaaatgagcgatagtggtgtaattaagaaaacagcgatggtattcggtcagatgaacgagccacctggtgctcgtatgcgtgttgcattatcaggtttaacaatggcagaatatttccgtgatgaagaaggccaagacgtattattattcattgataatatcttcagattcacacaagctggttctgaagtttcagcattacttggacgtatgccttcagccgttggttatcaaccaacacttgctactgaaatgggtcaattacaagaacgtattagttcaactaataaaggttctgttacttcaa

SEQ ID NO: 369 - DNA, 830 bp, Staphylococcus cohnii
  DSM 20260
gaagttccagaaattaataatgccttagttctcgatatagaaagagaagaaggtactgttgaattaacgttagaagttgcattacaacttggtgatgacgtagtacgaacaatcgcaatggattcaactgatggtgttaaacgtggtacagaagttagagatagcggaaatagtatcagcgtaccagttggtaatgaaacattaggtagagtatttaatgtattaggtgatacgatagatttagatgaagacatagatgactcagtgcgtcgtgacccaattcatagagaagcacctgcatttgatcagttatctactaaagttgaaattttagaaacaggtatcaaagtcattgatttattagcaccatatatcaaaggtggtaaagttggattattcggtggtgccggtgttggtaaaactgtattaattcaagaattaatcaataatatcgctcaagagcatggtggtatatccgtatttgctggtgtaggtgagcgtacgcgtgaaggtaatgacctatactttgaaatgagtgatagtggtgttattaaaaagacagctatggtatttggacaaatgaacgaaccacctggtgcgcgtatgcgagtagcactttctggtttaacaatggctgaatatttccgggatgaacaaggacaagatgttctattattcatagataacatctttagatttactcaagctggttcagaagtttctgcgttattaggtcgtatgccttcagctgttggttaccaaccaacgttagcaactgaaatgggacaattacaagaacgtattacttctacaactaaaggttcagtaac

SEQ ID NO: 370 - DNA, 787 bp, Staphylococcus epidermidis
  ref <308>: DATABASE ACCESSION NUMBER: ATCC 14990
aataatgcattacacatcgaagttcctaaagaagatggagcgcttcaattaacattagaagttgcacttcaactaggtgacgatgtagttcgtacaattgcaatggactcaactgacggcgttcaaagaggaatggaagttaaagatacaggtagagacataagtgtacctgtcggtgacgtaactctaggaagagtgtttaacgtactaggagaaactattgacttagatgaaaaaattgatgattcagtacgacgtgaccctatccatagacaagctccaggattcgacgaattatcaacaaaagtagaaatcttagaaactggtattaaagtagtagacttattagcaccttacataaaaggtggtaaaattggattatttggtggtgccggtgtaggtaaaaccgtactaatccaagaacttattaataacatcgctcaagaacacggtggtatctcagtattcgctggtgttggtgaacgtacacgtgaaggtaatgatctttactatgaaatgagtgacagtggtgttatcaagaaaactgcaatggtctttggtcaaatgaatgagccacctggtgcacgtatgcgtgtagcattatccggattaacaatggccgaatatttccgagatgaagaaggccaagatgtgttattattcattgataacattttcagattcactcaagctggttcagaagtttctgcgttattaggtcgtatgccatcagctgttggttatcaacctacacttgctacagaaatgggtcaattacaagaacgta

SEQ ID NO: 371 - DNA, 830 bp, Staphylococcus haemolyticus
  ref <308>: DATABASE ACCESSION NUMBER: ATCC 29970
gaagtacctgaaattaataacgccttaatcatcgaagttcccaaagaagatggtacttttgaattaacgcttgaagttgcattacaactaggtgatgacgttgttcgtacaattgctatggattcaacagatggtgttcaacgtggtatggaagttcagaacactggaaaagacatttcagtaccagttggcgaagtaactttaggacgtgtatttaacgtattaggtgacacaattgatttagaagataaattagatggttcagtaagacgtgatccaattcatagacaatcacctaactttgacgaattatctactgaagtagaaattcttgaaactggaatcaaagttgtagacttattagcaccatacatcaaaggtggtaaaatcggtctatttggtggtgccggtgttggtaaaaccgttttaatccaagaattgattaataatatcgcacaagaacatggtggtatctcagtatttgctggtgtaggtgaacgtacacgtgaaggtaacgacctatattatgaaatgagagatagtggtgttattaagaaaacagcaatggtatttggtcaaatgaacgagccacctggtgcacgtatgcgtgtggcactttctgcattgacaatggctgagtatttccgtgatgaacaaggacaagacgttctgttattcatcgataacattttcagatttactcaagcaggttcagaagtatcagcattattgggacgtatgccttcagctgtaggttatcaacctactttagctacagaaatgggtcaattacaagaacgtattacatcaacgaataaaggttcagtaac

SEQ ID NO: 372 - DNA, 846 bp, Staphylococcus hominis subsp. hominis
  ref <308>: DATABASE ACCESSION NUMBER: ATCC 27844
tcgaacataatgaagtccctgaaattaataatgccctaattattgaagtacccaaaaatgatggcacatttaaattaacattagaagttgcattgcaactaggtgatgatgttgttcgtactattgcaatggattcaactgatggtgttcaacgtggtatgcaagttgtgaatactggtaaagatattagtgttcctgtaggtgaagaaacacttggacgtgtgtttaacgttttaggagaaacaatagatttaaacgaaaaaatagatagttctgttagacgtgatccaattcatcgtcgtcaacctaattttgatgaattatctactgaagtagaaattcttgaaacaggtattaaagttgtagacttattagcaccttatattaaaggtggtaagattggtttattcggtggtgccggcgtaggtaaaactgtattaattcaagaattaatcaataatatcgctcaagaacatggtggtatttctgtattcgctggtgtaggtgaacgtactcgtgaaggtaacgatttatactatgaaatgagcgatagtggcgttatcaataaaacagccatggtatttgggcaaatgaatgagccgccaggtgcgcgtatgcgtgttgctttatcagcattgacaatggctgaatatttccgtgatgaacaaggtcaagatgtacttttattcattgacaatattttccgctttactcaagctggttctgaagtttcagcattattaggacgtatgccttcagctgtaggttatcaacctacattagcaactgaaatgggtcaattacaagaacgtattacatctactaataaaggttcagtcacttcaa

SEQ ID NO: 373 - DNA, 846 bp, Staphylococcus hominis
  strain CSG 175
tcgaacataatgaagtccctgaaattaataatgccctaattattgaagtacccaaaaatgatggcacattcaaattaacattagaagttgcattgcaactaggtgatgatgttgttcgtactattgcaatggattcaactgatggtgttcaacgtggtatgcaagttgtgaatactggtaaagatattagtgttcctgtaggtgaagaaacacttggacgtgtgtttaacgttttaggagaaacaatagatttaaacgaaaaaatagatagttctgttagacgtgatccaattcatcgtcgtcaacctaattttgatgaattatctactgaagtagaaattcttgaaacaggtattaaagttgtagacttattagcaccttatattaaaggtggtaagattggtttattcggtggtgccggcgtaggtaaaactgtattaattcaagaattaatcaataatatcgctcaagaacatggtggtatttctgtattcgctggtgtaggtgaacgtactcgtgaaggtaacgatttatactatgaaatgagcgatagtggcgttatcaataaaacagccatggtatttgggcaaatgaatgagccgccaggtgcgcgtatgcgtgttgctttatcagcattgacaatggctgaatatttccgtgatgaacaaggtcaagatgtacttttattcattgacaatattttccgctttactcaagctggttctgaagtttcagcattattaggacgtatgccttcagctgtaggttatcaacctacattagcaactgaaatgggtcaattacaagaacgtattacatctactaataaaggttcagtcacttcaa

SEQ ID NO: 374 - DNA, 835 bp, Staphylococcus lugdunensis
  ref <308>: DATABASE ACCESSION NUMBER: ATCC 43809
ataatgaagtgcctgaaataaataatgcgctcattgttgaaattcctaaaagtgatacaacaatcagtttaacacttgaagttgctttgcaattaggtgacgatgttgtacgtactattgcaatggattcaactgatggcgttcaacgtggtatggaagttcaaaacacaggtaaagacatcagtgtacctgttggagatgaaacattaggaagagtatttaacgttttaggagaatctattgatttagaagaaaagctagatgactctgtgcgtagagatccaattcatagactagcacctaaatttgatgaattatctacagaagtagaaattcttgaaactggtattaaagttgttgatttattagcaccatatattaaaggtggtaaagttggattgtttggtggtgccggagtaggtaaaacggtattaattcaagaattaatcaacaatattgctcaagaacatggtggtatttctgtgtttgccggagtaggtgaacgtacacgtgaaggtaatgacttatattatgaaatgagcgatagtggcgtaattaagaaaacagcgatggtatttggccaaatgaatgaaccacctggtgcacgtatgagagttgcgttatctgccttaacaatggctgaatatttccgtgacgagcaaggacaagacgtattgctgtttatcgataatatattccgttttacacaagcaggttcagaagtatctgcattacttggacgtatgccatctgccgttggttatcaaccaacattggctacagaaatgggacaattgcaagaaagaattacatctacaaataaaggttctgtaac

SEQ ID NO: 375 - DNA, 842 bp, Staphylococcus saprophyticus
  ref <308>: DATABASE ACCESSION NUMBER: ATCC 15305
gagcacaatgaagttccagaaattaacaatgccttagtcgtagacgttgaaagagatgaaggtacagtatctcttacattagaagtggcattacaacttggcgatgatgtcgtacgtacaattgcaatggattctactgatggtgttaaacgtggtacagaagttcgagatagcggagatagcatcagtgttccagttggtgatgctacgttaggacgtgtgtttaatgttcttggtgatacaattgacttagacgagaagcttgatacttctgtcaaacgtgatccaattcatagagaagcacctgcattcgatcaattatcaacaaaagttgaaatcttagaaacaggtattaaagtaattgatttacttgcaccatatattaaaggtggtaaaatcggtttattcggtggcgctggtgtaggtaaaacagtattaattcaagaattaattaataatatagctcaagaacatggtggtatttcagtatttgccggcgtaggtgaacgtacgcgtgaaggtaatgacttatactacgaaatgagtgatagtggtgttattaagaaaacagctatggtcttcggacaaatgaatgagccacctggtgcgcgtatgcgtgttgctttatcaggcttaacaatggctgaacacttccgtgatgtacaaggacaagatgttttactatttattgataacatattcagatttacgcaagctggttcagaagtatcagcactattaggtcgtatgccatcagccgttggttatcaacctacccttgctactgaaatgggtcaattacaagaacgtattacatcaacaactaaaggatctgtaacgtc

SEQ ID NO: 376 - DNA, 842 bp, Staphylococcus simulans
  ref <308>: DATABASE ACCESSION NUMBER: ATCC 27848
tgatgaactgcctaagattaataacgcattagtgctagatgtacctaagaaagatggcacgactgaatctcttacattagaagtagcacttgaattaggcgacgacgtagttagaactatcgccatggactctacagacggaattaaacgtggtgacgacgttaaagacactggtcgtccaatcagtgtacctgtcggtgaagatacgttaggaagagtatttaacgttttaggtgatccaatcgataatgatggaccgatttctgaatcagttccacgtgaaccaattcatagacaaccacctaaatttgatgaattatcaacaaaagttgaactacttgaaactggtatcaaagtagtagacttattagcaccatatatcaaaggtggtaaagttggtttattcggtggtgccggagtaggtaaaactgtattaatccaagaattaattaataacatcgctcaagaacacggcggtatttcagtattcgcaggtgttggtgaacgtacacgtgaaggtaacgacttgtacttcgaaatgagcgacagtggtgttatcaagaaaacagcgatggtattcggacaaatgaacgaaccacctggtgcacgtatgcgtgtagctttatcaggtttaacaatggctgaatacttccgtgatgttaaaggacaagacgttcttttattcatcgataacattttccgcttcacacaagcaggttctgaggtatcagcattgcttggccgtatgccatcagccgttggttaccaaccaacattggcaacagaaatgggtcaattacaagaacgtatcacttctacaatgaaaggttctatcacatcta

SEQ ID NO: 377 - DNA, 841 bp, Staphylococcus warneri
  ref <308>: DATABASE ACCESSION NUMBER: ATCC 27836
cataacgaagtccctgatattaataatgcccttattattgaagttccaaaagaagatggaacgttaaacttaacattagaagttgcactacaattaggtgatgatgttgtacgtacaattgcaatggattcaactgatggtgttcaaagaggcatggatgttaaagacacaggtaaagatattagtgtacctgtaggcgatgaaacgcttggaagagtgtttaatgtactaggtgaaacaattgacttggaagagaaaattgatgattccgtacgtcgtgatccaatccatagacaatcaccaggtttcgatgaattatctactgaagtagaaatcttagaaacaggtattaaagtagtagacttattagcaccttacattaaaggtggtaaagttggactattcggtggtgccggagtaggtaaaaccgttttaatccaagaattaattaacaatattgcacaagaacatggtggtatttcagtattcgcgggtgtaggtgaacgtactcgtgaaggtaatgatttatactatgaaatgagtgatagtggtgtaattaagaaaacagcgatggtatttggacaaatgaatgaaccacctggcgcacgtatgcgtgtagctttatctggtttaactatggctgaatacttccgtgatgaacaaggacaagacgtacttttattcatcgataatattttcagatttacacaagctggttctgaagtttctgcattacttggtcgtatgccttcagccgttggttaccaaccaacattagcaactgaaatgggtcaattacaagaacgaattacatctacaaataaaggttctgtaacatcta

SEQ ID NO: 378 - DNA, 846 bp, Streptococcus acidominimus
  ref <308>: DATABASE ACCESSION NUMBER: ATCC 51726
tttaacacgaatgaaccgcttcctgagataaataatgcacttgttgtttacaaagacagtgagaaaaaacataaaatcgttcttgaagtagctcttgaacttggtgaaggcctcgttcgtaccattgctatggaatcaactgatggtttgacacgtggtctagaagttcttgatacaggccgtgcaatcagtgtaccagttggtaaagaaacgcttggacgtgtcttcaacgttcttggtgatgctatcgatcttgaagaaccatttggagaagatgcagaacgtcaccccattcataagagtgccccaacttttgatgaattatcaacgtcaacagaaatccttgaaacagggattaaagttatcgacctacttgccccttacttaaaaggagggaaggttggacttttcggtggtgccggagttggtaagaccgttcttatccaagagttgattcataacattgctcaagagcatggtggtatttcagtatttaccggagttggtgaacgtacacgtgaaggtaatgacctctattgggaaatgaaagaatcaggcgttattgaaaaaacagctatggtatttggtcagatgaatgagccacctggtgcacgtatgcgtgtagcccttactggtttgacaatcgctgaatatttccgtgatgttgaaggacaggacgtgcttctctttattgataacatttttcgtttcacacaagcaggttctgaagtttcagctcttcttggacgtatgccatcagccgttggttatcaaccaaccttggcaactgaaatgggtcaattgcaagaacgtatcacgtcaactaaaaaaggttctgttacatca

SEQ ID NO: 379 - DNA, 846 bp, Streptococcus agalactiae
  ref <308>: DATABASE ACCESSION NUMBER: ATCC 12403
ttgcaagtggcgacaaacttcctgagattaataatgcattgattgtctataaaaatggcgataagtcacaaaaagtagtacttgaagttactcttgaacttggtgacggcctcgttcgtacaatcgctatggaatcaactgatgggcttacacgtggtttggaagtattagatactggtcgcgcaattagtgtgccggttggtaaggatactttgggtcgtgtcttcaacgttcttggagatgctattgaccttgaagagccttttgcagaagatgcagaacgtcaaccaatccataaaaaagcaccatcgtttgatgaattatcaacatcatcagaaatcttagaaacaggtattaaagttattgacttattagcaccttacttaaaaggtggtaaagttggacttttcggtggtgcaggtgttggtaaaaccgttcttattcaagaattaatccacaacatcgcccaagaacatggtggtatttcagtatttactggtgtaggagaacgtactcgtgaagggaatgacctttattgggaaatgaaagaatctggcgttattgaaaaaacggctatggtctttggtcaaatgaatgaaccaccaggagcacgtatgcgtgtggcacttactggtcttacaatagctgagtacttccgtgatgtagaaggacaagatgtgcttctcttcattgataatatcttccgtttcacacaagctgggtcagaagtgtcagcgcttttaggtcgtatgccttcagccgttggttatcaaccaacacttgctacagaaatgggacaattacaagagcgtatcacttcaactaaaaaaggttctgttacctcaa

SEQ ID NO: 380 - DNA, 846 bp, Streptococcus agalactiae
  ref <308>: DATABASE ACCESSION NUMBER: ATCC 13813
ttgcaagtggcgacaaacttcctgagattaataatgcattgattgtctataaaaatggcgataagtcacaaaaagtagtacttgaagttgctcttgaacttggtgacggcctcgttcgtacaatcgctatggaatcaactgatgggcttacacgtggtttggaagtattagatactggtcgcgcaattagtgtgccggttggtaaggatactttgggtcgtgtcttcaacgttcttggagatgctattgatcttgaagagccttttgcagaagatgcagaacgtcaaccaatccataaaaaagcaccatcgtttgatgaattatcaacatcatcagaaatcttagaaactggtattaaagttattgacttattagcaccttacttaaaaggtggtaaagttggacttttcggtggtgcgggtgttggtaaaaccgttcttattcaagaattaatccacaacatcgcccaagaacatggtggtatttcagtatttactggtgtaggagaacgtactcgtgaagggaatgacctttattgggaaatgaaagaatctggcgttattgaaaaaacggctatggtctttggtcaaatgaatgaaccaccaggagcacgtatgcgtgtggcacttactggtcttacaatagctgagtacttccgtgatgtagaaggacaagatgtgcttctcttcattgataatatcttccgtttcacacaagctgggtcagaagtgtcagcgcttttaggtcgtatgccttcagccgttggttatcaaccaacacttgctacagaaatgggacaattacaagagcgtatcacttcaactaaaaaaggttctgttacctcaa

SEQ ID NO: 381 - DNA, 845 bp, Streptococcus agalactiae
  ref <308>: DATABASE ACCESSION NUMBER: ATCC 12973
ttgcaagtggcgacaaacttcctgagattaataatgcattgattgtctataaaaatggcgataagtcacaaaaagtagtacttgaagttgctcttgaacttggtgacggcctcgttcgtacaatcgctatggaatcaactgatgggcttacacgtggtttggaagtattagatactggtcgtgcaattagtgtgccggttggtaaggatactttgggtcgtgtcttcaacgttcttggagatgctattgaccttgaagagccttttgcagaagatgcagaacgtcaaccaatccataaaaaagcaccatcatttgatgaattatcaacatcatcagaaatcttagaaacaggtattaaagttattgacttattagcaccttacttaaaaggtggtaaagttggacttttcggtggtgcgggtgttggtaaaaccgttcttattcaagaattaatccacaacatcgcccaagaacatggtggtatttcagtatttactggtgtaggagaacgtactcgtgaagggaatgacctttattgggaaatgaaagaatctggcgttattgaaaaaacggctatggtctttggtcaaatgaatgaaccaccaggagcacgtatgcgtgtggcacttactggtcttacaatagctgagtacttccgtgatgtagaaggacaagatgtgcttctcttcattgataatatcttccgtttcacacaagctgggtcagaagtgtcagcgcttttaggtcgtatgccttcagccgttggttatcaaccaacacttgctacagaaatgggacaattacaagagcgtatcacttcaactaaaaaaggttctgttacctca

SEQ ID NO: 382 - DNA, 845 bp, Streptococcus agalactiae
  ref <308>: DATABASE ACCESSION NUMBER: ATCC 27591
ttgcaagtggcgacaaacttcctgagattaataatgcattgattgtctataaaaatggcgataagtcacaaaaagtagtacttgaagttgctcttgaacttggtgacggcctcgttcgtacaatcgctatggaatcaactgatgggcttacacgtggtttggaagtattagatactggtcgcgcaattagtgtgccggttggtaaggatactttgggtcgtgtcttcaacgttcttggagatgctattgaccttgaagagccttttgcagaagatgcagaacgtcaaccaatccataaaaaagcaccatcgtttgatgaattatcaacatcatcagaaatcttagaaactggtattaaagttattgacttattagcaccttacttaaaaggtggtaaagttggacttttcggtggtgcaggtgttggtaaaaccgttcttattcaagaattaatccacaacatcgcccaagaacatggtggtatttcagtatttactggtgtaggagaacgtactcgtgaagggaatgacctttattgggaaatgaaagaatctggcgttattgaaaaaacggctatggtctttggtcaaatgaatgaaccaccaggagcacgtatgcgtgtggcacttactggtcttacaatagctgagtacttccgtgatgtagaaggacaagatgtgcttctcttcattgataatatcttccgtttcacacaagctgggtcagaagtgtcagcgcttttaggtcgtatgccttcagccgttggttatcaaccaacacttgctacagaaatgggacaattacaagagcgtatcacttcaactaaaaaaggttctgttacatca

SEQ ID NO: 383 - DNA, 845 bp, Streptococcus agalactiae; identical to SEQ ID NO: 382
  strain CDCss-1073

SEQ ID NO: 384 - DNA, 845 bp, Streptococcus dysgalactiae
  ref <308>: DATABASE ACCESSION NUMBER: ATCC 43078
ttgctagtggggacaaacttccagagattaataatgcattgattgtttataaagatagtgataaaaagcaaaaaatcgtccttgaagttgctctggaacttggtgacggtatggtgcgaacaatcgctatggaatcaactgatgggcttacacgtgggttagaagttcttgacactggtcgtgcgattagtgtaccagtaggtaaagaaactttgggacgcgtctttaatgtacttggagaaaccattgacttggaagaaccatttgcagaagacgttgaccgtcagccaatccataaaaaagcaccatcgtttgatgaattatcaacatcatcagaaattcttgaaactggtatcaaggtaattgaccttcttgccccttaccttaaaggtggtaaagttggacttttcgggggtgccggagttggtaagactgtccttatccaagaattaatccacaatatcgcccaagaacacggaggtatttcagtatttaccggtgttggtgagcgaacacgtgaaggaaatgacctttactgggaaatgaaagaatcaggcgttattgagaaaactgccatggtttttggtcagatgaatgagccgcctggggcacgtatgcgtgtagcccttactggtttaaccattgctgagtatttccgtgatgtagaaggccaagatgttttgctctttattgataatatcttccgtttcactcaggcaggttcagaagtatcagccctcttaggccgtatgccttctgctgttggttaccaaccgacccttgctactgaaatgggacaattgcaagaacgtattacgtcaactcaaaaaggatctgttacttct

SEQ ID NO: 385 - DNA, 846 bp, Streptococcus equi subsp. equi
  ref <308>: DATABASE ACCESSION NUMBER: ATCC 9528
ttgcgagtggggacaaactaccagagattaataatgcgttgatagtttataaagatggcgataaaaagcaaaaaatcgttctcgaggttgccctagagcttggagacggtatggtacgtacaattgctatggaatcaaccgatgggcttacacgtggattagaggttcttgatactggtcgtgccattagtgtaccagttggtaaagagactctaggtcgtgttttcaacgttcttggtgaaaccatcgacctagaagcaccatttgcagatgatgttaatcgtgaaccgatccataaaaaagcaccagcctttgatgaattgtcaacatcatcagaaattcttgaaacaggtatcaaggttattgacctgcttgccccttacttaaagggtggtaaggtcggtcttttcggtggtgccggagttggtaaaaccgttcttatccaagaattaatccacaatatcgctcaagagcatggtgggatctcggtatttaccggtgttggtgagcgtacgcgtgaaggaaatgacctttactgggaaatgaaggaatcaggcgttattgaaaaaacagccatggtttttggtcagatgaatgaaccaccaggagcccgtatgcgtgttgccttgaccggcttgacaattgctgaatatttccgcgatgttgaaggccaagacgtcctgctcttcattgacaatattttccgctttactcaagcaggctcagaggtatcagcccttctaggtcgtatgccttcagccgttggttaccagccaacacttgccactgaaatgggacaattgcaagagcgtatcacctcaacgaaaaaaggctctgttacctcta

SEQ ID NO: 386 - DNA, 843 bp, Streptococcus anginosus
  ref <308>: DATABASE ACCESSION NUMBER: ATCC 27335
gcagctggtgataaacttcctgagattaacaatgcattggtcgtttatactgatgaacaaaagtctaaacgtatcgtgctcgaagtagctcttgaacttggagaaggtgtggttcgtaccattgccatggaatctactgatggattgactcgtggactagaagttctggacactggtcgtccaatcagcgttcctgttggtaaagatacccttggacgtgtctttaacgttcttggtgataccattgacttggaagcaccttttgcagacgatgcagagcgtgaaccaattcacaaaaaagcaccaactttcgatgaattgtcaacatctactgaaatccttgaaacagggattaaagttatcgacttgctagccccttaccttaagggtggtaaagtcggactcttcggtggtgccggtgttggtaaaaccgttcttattcaagagttgattcacaacattgcccaagagcacggtggtatttccgtgtttacaggtgttggtgaacgtacacgtgaaggtaatgacctttactgggaaatgaaagaatctggcgttatcgagaaaacagccatggtcttcggtcaaatgaacgaaccacctggagcacgtatgcgtgttgcccttactggtttgacaattgcggaatacttccgtgatgtcgagggtcaagacgttcttctcttcatcgataacatcttccgtttcactcaagcaggttctgaggtttctgcccttcttggtcgtatgccatcagccgttggttaccaacctacacttgctactgaaatgggtcaattgcaagaacgtatcacatcaactaaaaaaggttctgttacatct

SEQ ID NO: 387 - DNA, 843 bp, Streptococcus salivarius; identical to SEQ ID NO: 386
  ref <308>: DATABASE ACCESSION NUMBER: ATCC 7073

SEQ ID NO: 388 - DNA, 841 bp, Streptococcus suis
  ref <308>: DATABASE ACCESSION NUMBER: ATCC 43765
ttgcagcagaagataaacttcctgagattaacaacgcactcgttgtatataaaaatgatgattccaaacaaaaagtcgtgcttgaagtggctttggaacttggtgatggcgttgtacggaccattgccatggaatcaacggatggattgacacgtgggatggaagttctcgatacaggtcgtcccatctctgttccagtcggtaaagaaacgctgggtcgtgtcttcaatgtgttgggagataccattgaccttgaagagtcttttccggcagattttgaacgtgagcctatccataagaaagcgccggcttttgacgaattatctacttcaagcgaaattttggaaacagggattaaggttatcgacctcctagcaccttatctaaaaggtggtaaggttggtctcttcggtggtgctggtgttggtaaaaccgttcttatccaagaattgattcacaatattgcccaagaacacggtggtatctctgtatttaccggagttggcgagcgtacccgtgaagggaacgatctttactgggaaatgaaagaatcaggtgttattgaaaaaacggccatggtatttggtcagatgaatgagccaccaggagcccgtatgcgtgttgctcttactggtttgactattgcggaatacttccgtgatgtggaagggcaggatgttcttctgttcatcgataatatcttccgtttcacacaggctggttcagaagtgtctgccctcttgggtcgtatgccatcagccgttggttatcagccaacacttgcgacggagatgggacaattgcaggagcgtattacctcaaccaagaagggttctgttac

SEQ ID NO: 389 - DNA, 844 bp, Streptococcus uberis
  ref <308>: DATABASE ACCESSION NUMBER: ATCC 19436
gcaaacggtgaaaaattaccagagattaataatgcattgatagtttataaaggtagcgataaaaaacaaaagattgttcttgaagttgctttggaacttggggacggaatggttcgtacaatcgctatggaatcaactgatgggcttacacgtggattagaagttttagatactggccgtgccattagtgtaccagtcggaaaagaaactttgggtcgtgttttcaatgtgcttggtgaaaccattgatttggatgaaccatttgccgctgatgctgcaagagaacccatccataaaaaagccccagcatttgatgaactatcaacgtcttcagaaattcttgaaaccggaataaaagttattgacttattagccccttatctcaaaggtggtaaagttggtttatttggtggtgccggagtaggtaaaacggttttaattcaagaattaattcataatattgcacaagaacatggtggtatttcagtatttaccggtgttggtgaaagaactcgtgaaggtaatgacctttattgggaaatgaaagaatctggcgttattgaaaaaacagccatggtatttggacaaatgaacgaaccaccaggagcacgtatgcgcgttgctttaacaggtttaaccattgctgaatatttccgggatgttgaaggtcaagatgttttgctctttattgacaacattttccgtttcacgcaagctggttcagaagtttcagccctattgggtcgtatgccttcagcggtaggataccaaccaacacttgctaccgaaatgggacaattgcaagaaagaattacctcaactaacaagggatctgttacttcta

SEQ ID NO: 390 - DNA, 846 bp, Tatumella ptyseos
  ref <308>: DATABASE ACCESSION NUMBER: ATCC 33301
ttccctcaggacgctgtaccacaggtgtacaacgctcttgaggttgaaaatggtgatacccgtctggtgctggaagttcagcagcagctgggcggtggtgtcgttcgtacgattgcaatgggaacctctgacggcctgaaacgtggccttaaggtgaccgatctgcaaaaaccgattcaggtaccggtcggtaaagcgacgctgggccgtatcatgaacgtactgggtcagccaatcgatatgaaaggcgacctgaagaacgaagatggtagcaatgttgaggtgaactctattcaccgtgcagcgccaagctacgaagaactggctaactctactgagctgctggaaacgggtatcaaggttatcgacctgatctgtccgtttgcaaaaggcggtaaagtgggtctgttcggtggtgcgggtgtaggtaagaccgtcaacatgatggaactgatccgtaacatcgctatcgagcactctggttactctgtatttgcaggggtgggtgagcgtacccgtgaaggtaacgacttctaccacgaaatgaccgagtctaacgttctggataaagttgctctggtttatggccagatgaacgagccaccaggaaaccgtctgcgcgttgcgctgaccggtctgactatggctgaaaaattccgtgacgaaggccgtgacgtactgctgttcgttgataacatctatcgttataccctggccggtactgaagtttcagcactgctgggtcgtatgccttctgcggtaggttatcagccaacactggccgaagaaatgggtgttcttcaggaacgtatcacgtcaaccaaaaccggttcaatcacttccgta

SEQ ID NO: 391 - DNA, 829 bp, Trabulsiella guamensis
  ref <308>: DATABASE ACCESSION NUMBER: ATCC 49490
ttccctcaggatgccgtaccgcgcgtgtacgatgctcttgaggttatgaatggtagtgagcgtctggtgctggaagttcagcagcagctcggtggtggtatcgtacgtactatcgccatgggttcttccgacggtctgcgtcgtggtctggatgtaaaagatctcgagcatccgatcgaagtcccggtaggtaaagcaacgctgggtcgtatcatgaacgtgctgggtcagccgatcgatatgaaaggcgacatcggcgaagaagagcgttgggctatccaccgcgcagcaccgtcctacgaagagctgtccagctctcaggaactgctggaaaccggcatcaaagttatcgacctgatgtgtccgttcgcgaagggcggtaaagtcggtctgttcggtggtgcgggtgtaggtaaaaccgtaaacatgatggagctgattcgtaacatcgcgatcgagcactccggttactctgtgtttgcgggcgtgggtgaacgtactcgtgagggtaacgacttctaccacgaaatgaccgactccaacgttctggacaaagtatccctggtgtatggacagatgaacgagccgccgggaaaccgtctgcgcgttgcactgaccggtctgaccatggctgagaagttccgtgacgaaggtcgtgacgttctgctgttcgtcgataacatctaccgttacaccctggcgggtactgaagtatctgcactgctgggccgtatgccttcagcggtaggttaccagccgaccctggcggaagagatgggtgttcttcaggaacgtatcacctcaaccaaaaccggttctatcacctccg

SEQ ID NO: 392 - DNA, 835 bp, Yersinia bercovieri
  ref <308>: DATABASE ACCESSION NUMBER: ATCC 43970
cgaattcccccaagacgctgtaccaaaagtgtacaacgcccttgaggttgaaggcacagctcagaagctggtgctggaagttcagcaacagctgggcggtggtgttgttcgttgtatcgcaatgggctcttccgatggtctgagccgcgggttgaaagtcatcaacctggaacacccaattgaagtgccggtgggtaaatcaactctgggccgtatcatgaacgtattgggtgacccaatcgacatgaaaggtcctatcggtgaagaagagcgttgggcaatccaccgcgaagcgccttcttacgaagagcttgccagctcgcaagatctgttagaaaccggtatcaaggtaatggatctgatttgtccgttcgctaagggcggtaaagtcggtctgttcggtggtgcgggtgtgggtaaaacagtcaacatgatggagctgattcgtaatattgcgattgagcactcaggttattctgtatttgccggtgtgggtgagcgtactcgtgagggtaacgacttctaccacgagatgactgactccaacgttctggacaaagtatccttggtttatggccagatgaatgagccaccaggtaaccgtctgcgcgttgcactgaccggcttgaccatggcggagaaattccgtgatgaaggtcgtgatgtactgttattcatcgataacatctatcgttataccctggccggtacagaggtatctgcactgctaggtcgtatgccatcagcggtaggctatcagccaacgctggcagaagagatgggtgtgttgcaggaacgtatcacttccaccaagacgggttcaatcacctccgta

SEQ ID NO: 393 - DNA, 812 bp, Yersinia enterocolitica
  ref <308>: DATABASE ACCESSION NUMBER: ATCC 9610
gctgtaccaaaagtgtacaacgcccttgaggttgaaggcgcagctgagaagctggtgctggaagttcagcaacagctgggcggtggtgttgttcgttgtatcgcaatgggctcttccgatggtctgagccgtgggttgaaagtcatcaacctggaacacccaattgaagtgcctgtgggcaagtcaactctgggccgtatcatgaacgtattgggtgacccaatcgacatgaaaggtcctatcggcgaagaagagcgttgggcaatccatcgtgaagcgccttcttacgaagatcttgccagctcgcaagacttgttagaaaccggtatcaaggtaatggacttgatttgtccgttcgctaagggcggtaaagtcggtctgttcggtggtgcgggtgtaggtaaaacggtaaacatgatggagcttattcgtaacattgcgattgagcactcaggttattccgtatttgctggcgtgggtgagcgtactcgtgagggtaacgacttctaccacgagatgactgactccaacgttctggacaaagtatccttggtttatggccaaatgaatgagccaccaggtaaccgtctgcgcgttgcactgaccggcttgaccatggcggagaaattccgtgatgaaggtcgtgacgtattgctgttcatcgataacatctatcgctataccttagccggtacggaagtttccgcactgctgggtcgtatgccatctgccgtaggttaccagccaacgctggcagaagagatgggtgtgttgcaggaacgtattacttccaccaagacgggttcaatcac

SEQ ID NO: 394 - DNA, 802 bp, Yersinia frederiksenii
  ref <308>: DATABASE ACCESSION NUMBER: ATCC 33641
aaagtgtacaacgcccttgaggttgaaggtactgctgagaagttagtactggaagttcagcaacagctgggcggtggtgttgctcgttgtatcgccatgggctcttccgatggtttgagccgcgggttgaaagttgtcaacctggaacacccaattgaagtaccggttggtaaatcaactctgggccgtatcatgaacgtattgggtgacccaatcgacatgaaaggtcctatcggtgaagaagagcgttgggcaatccaccgcgaagcgccttcttacgaagagcttgccagctcgcaagatctgttagaaaccggtatcaaggtaatggatctgatttgcccgttcgctaaaggcggtaaagtcggtctgttcggtggtgcgggtgtaggtaaaacggtaaacatgatggagctgatccgtaatatcgcgatcgagcactcaggttattccgtatttgcgggtgttggtgaacgtacccgtgagggtaacgacttctaccacgagatgactgactccaacgttctggacaaagtatccttggtttatggccagatgaatgagccaccaggtaaccgtcttcgcgttgcactgaccggtctgaccatggcggagaaattccgtgatgaaggtcgtgacgtattgctgttcatcgataacatctatcgttataccttggccggtacggaagtatccgcactgctgggtcgtatgccatctgcggtaggctatcagccaacgctggcagaagagatgggtgtgttgcaggaacgtattacttccaccaagacgggttcaatca

SEQ ID NO: 395 - DNA, 806 bp, Yersinia intermedia
  ref <308>: DATABASE ACCESSION NUMBER: ATCC 29909
gctgtaccaagagtgtacaacgcccttgaggttgaaggcactgctgagaagctggtgctggaagttcagcaacagctaggcggtggtgttgttcgttgtatcgcaatgggctcttccgatggtctgagccgcgggttgaaagtcatcaacctggaacacccaattgaagtgccggttggtaaatcaactctgggccgtatcatgaacgtattgggtgacccaatcgacatgaaaggtcctatcggtgaagaagagcgttgggcaatccaccgcgaagcgccttcttacgaagagcttgccagctcacaagatttgttagaaaccggtatcaaagtaatggacttgatttgcccgttcgctaagggcggtaaagtgggtctgttcggtggtgcgggtgtaggtaaaacagtaaacatgatggagcttattcgtaacatcgcgattgagcactcaggttattctgtatttgctggtgtgggtgagcgtactcgtgagggtaacgacttctaccacgagatgactgactccaacgttctggacaaagtatccttggtgtatggccagatgaatgagccaccaggtaaccgtctgcgcgttgcactgaccggcctgaccatggcggagaaattccgtgatgaaggtcgtgacgtactgttgttcatcgataacatctatcgctataccttggccggtacggaagtatccgcactgctgggtcgtatgccatcagcggtaggctaccagccaacgctggcagaagagatgggtgtgttgcaggaacgtattacgtccaccaagacgggttc

SEQ ID NO: 396 - DNA, 806 bp, Yersinia pseudotuberculosis
  ref <308>: DATABASE ACCESSION NUMBER: ATCC 29833
gctgtaccaaaagtgtacaacgcccttgaggtagaaggcacaactgaaaagttagtgctggaagttcagcaacagttgggcggtggtgttgttcgttgtatcgcaatgggctcttccgatggtctgagccgtgggttgaaagtaaccaacctggaacacccgatcgaagtaccggttggtaaagcgacccttggccgtatcatgaacgtattgggtgaaccaatcgacatgaaaggtcctatcggtgaagaagagcgttgggcaatccatcgcgaagcgccttcttatgaagagcttgctagctcacaagatctgttagaaaccggtatcaaggttatggacctgatttgtccgtttgctaagggcggtaaagtcggtctgttcggtggtgcgggtgtaggtaaaacagtaaacatgatggagctgatccgtaacatcgcgatcgagcactctgggtattctgtatttgccggtgtaggtgagcgtacccgtgagggtaatgacttctaccatgaaatgactgactccaacgttttggacaaagtatccttggtttacggccagatgaatgagccaccaggtaaccgtctacgcgttgcactgaccggcctgaccatggcggagaaattccgtgatgaaggtcgtgacgtactgctgttcatcgataatatctatcgttataccctagctggtacggaagtatccgcattgctgggtcgtatgccatcagcggtaggttatcagccaacactggctgaagagatgggtgtgttgcaggaacgtattacttccactaagacgggttc

SEQ ID NO: 397 - DNA, 829 bp, Yersinia rohdei
  ref <308>: DATABASE ACCESSION NUMBER: ATCC 43380
ttcccccaagacgctgtaccaaaagtgtacaacgcccttgaggttgaaggtgcagctgagaagcttgtgctggaagttcagcagcagctgggcggtggtgttgttcgttgtatcgcaatgggctcttccgatggtttgagccgtgggttgaaagttatcaacctggaacacccaattgaagtgccagttggtaaatcaactctgggccgtatcatgaacgtattgggtgacccaatcgacatgaaaggccctatcggtgaagaagagcgttgggcaatccaccgtgaagcgccttcttacgaagagcttgccagctcgcaagatctgttagaaaccggtatcaaggtaatggatctgatttgtccgttcgctaagggcggtaaagtcggtctgttcggtggtgcgggtgttggtaaaacagtaaacatgatggagcttattcgtaacatcgcgattgagcactcaggttattctgtatttgccggggtaggtgaacgtactcgtgagggtaacgacttctaccacgagatgactgactccaacgttctggacaaagtatccttggtttatggccagatgaatgagccaccaggtaaccgtctgcgcgttgcactgaccggcttgaccatggcggaaaaattccgtgatgaaggccgtgacgtattgctgttcatcgataacatttatcgttataccctagccggtacggaagtatccgcactgctgggtcgtatgccatctgcggtaggctatcagccaacactggcagaagagatgggtgtgttgcaggaacgtattacttccactaagacgggttcaatcacctccg

SEQ ID NO: 398 - DNA, 819 bp, Yokenella regensburgei
  ref <308>: DATABASE ACCESSION NUMBER: ATCC 35313
atgccgtaccgcgcgtgtacgatgctcttgaggtacaaaatggtaacgagaaactggtgctggaagctcagcagcagctcggcggcggtatcgtgcgtactatcgccatgggttcttccgacggtctgcgtcgtggtctggaagttaaagacctcgagcacccgatcgaagtcccggtaggtaaagcaaccctgggccgtatcatgaacgtcctgggtcagccgatcgacatgaaaggcgacatcggtgaagaagagcgttgggctatccaccgcgcagcaccttcctatgaagagctgtccagctctcaggaactgctggaaaccggtatcaaagtaatggatctgatctgcccgttcgctaagggtggtaaagtcggtctgttcggtggtgcgggtgtaggtaaaactgtaaacatgatggagcttatccgtaacatcgcgattgagcactccggttactctgtgtttgcaggcgtgggtgaacgtactcgtgagggtaacgacttctaccacgaaatgaccgactccaacgtactggataaagtatccctggtgtacggccagatgaacgagccgccgggaaaccgtctgcgcgttgcgctgaccggcctgaccatggctgagaaattccgtgacgaaggccgtgacgttctgctgttcgtcgataacatctaccgttataccctggccggtacggaagtatccgcactgctgggtcgtatgccttctgcggtaggttatcagccaactctggcggaagagatgggtgttcttcaggaacgtatcacctctaccaaaaccggttctatcacctccg

SEQ ID NO: 399 - DNA, 1097 bp, Yarrowia lipolytica
  ref <308>: DATABASE ACCESSION NUMBER: ATCC 38295
aagcttaaggctgagcgagagcgaggtatcaccattgatatcgctctctggaagttccagacccctaagtactacgtcaccgttattgatgctcccggtcaccgagatttcatcaagaacatgattaccggtacttcccaggctgactgcgccatcctcatcattgctggtggtgttggtgagttcgaggctggtatctccaaggatggtcagacccgagagcacgccctgctcgctttcaccctcggtgttaagcagctcattgttgctatcaacaagatggactccgtcaagtggtctcaggatcgatacctcgagatttgcaaggagactgccaacttcgtcaagaaggtcggttacaaccccaaggctgtccccttcgtccccatttccggatggaacggtgacaacatgatcgagccctctaccaactgtgactggtacaagggatggaccaaggagaccaaggccggcgagatcaagggtaagaccctcctcgaggccattgatgccattgagccccccgtgcgaccccacgacaagcccctccgacttcccctccaggatgtctacaagatcggtggtatcggcacagtgcccgttggccgagtcgagaccggtgttatcaaggccggtatggktgttaccttcgctcccgccaacgtgaccactgaggtcaagtctgtcgagatgcaccacgagatcctccccgatggaggtttccccggtgacaacgtcggtttcaacgtcaagaacgtttccgtcaaggatatccgacgaggtaacgttgctggtgactccaagaacgacccccccaagggctgcgactctttcaacgctcaggtcattgttcttaaccaccccggtcagatcggtgctggttacgctcccgtccttgattgccacactgcccacattgcttgcaagttcgacaccctgatcgagaagatcgaccgacgaaccggtaagaagatggaggactcccccaagttcatcaagtctggtgatgctgccattgtcaagatggttccctccaagcccatgtgtgtcgaggccttcactgagtacccccctcttggtcgattcgccgtccgaga

SEQ ID NO: 400 - DNA, 1233 bp, Absidia corymbifera
  misc_feature (1)...(1233): n=a,t,c or g
  ref <308>: DATABASE ACCESSION NUMBER: ATCC 46775
caagcttaaggctgaacgtgagcgtggtatcaccatcgatatcgctctctggaagttcgagactcccaagtaccacgttaccgtcattgatgcccctggccatcgtgatttcatcaagaacatgattactggtacttcccaagctgactgcggtatcttgattattgctgctggtactggtgaattcgaagctggtatctccaaggatggtcaaacccgtgaacacgctttgcttgctttcacccttggtgtccgtcaattgattgtcgctatcaacaagatggattccaccaagtactctgaggcccgttacaacgaaattgtcaaggaagtctccaccttcatcaagaagattggtttcaaccccaagtccgttcctttcgtccctatctctggctggaacggtgacaacatgttggaggartccaccaacatgccttggttcaagggatggaacaaggagactaaggctggtgccaagacyggcaagacccttcttgaagccattgacaacattgatccccctgttcgtccttccgacaagccccttcgtcttccccttcaagatgtctacaagatcggtggtattggtacagttcctgtcggtcgtgttgagactggtgtcatcaagcctggtatggttgtcaccttcgctcccgctaacgtcaccactgaagtcaagtccgtygaaatgcaccacgagcaacttgctgaaggtgttcccggtgacaacgtcggtttcaacgtcaagaacgtttccgtcaaggatatccgccgtggtaacgtytgctctgactccaagaacgaccccgccaaggaatccgcttccttcaccgctcaagttattgtcttgaaccaccctggtcarattggtgctggttactctcctgtcttggattgccacactgctcacattgcatgcaagttctytkagcttcttkagaagatcgatygtcgttccggtaagtaaatantttggtttrggatatgggtattgggcttaatctytggattttgcctcaattgctccttccttgatctttctcgattactttttgatcatttgctaatccaaaccctttccatttyattgaaaacaggtaagaagttggaagactcccccaagttcgtcaagwsyggtgactctgcyatcgtcaagatggttccttccaagcccatgtgcgttgaagcctacactgaatatcctcctcttggtcgtttcgctgtccgtga

SEQ ID NO: 401 - DNA, 1151 bp, Alternaria alternata
  ref <308>: DATABASE ACCESSION NUMBER: ATCC 62099
caagttgaaggccgagcgtgagcgtggtatcaccatcgacattgctctctggaagttcgagactcccaaggttagtacccctctgcctactacatcaagttctttacaatgctaacatgttgtactcagtactatgtcaccgtcattgacgcccccggtcaccgtgatttcatcaagaacatgatcactggtacctcccaggccgactgcgctattctcatcattgccgccggtactggtgagttcgaggctggtatctccaaggatggccagactcgtgagcacgctctcctcgcttacaccctcggtgtcaagcagctcatcgttgccatcaacaagatggacaccaccaagtggtccgaggagcgttaccaggagatcatcaaggagacctccaacttcatcaagaaggtcggctacaaccccaagcacgttcccttcgtccccatctccggtttcaacggtgacaacatgattgaggcctcatccaactgcccctggtacaagggttgggagaaggagaccaaggccaaggccactggtaagaccctcctcgaggccatcgacgccatcgaccctyccagccgtcccaccgacaagcccctccgtcttcccctycaggatgtttacaagattggtggtattggcacggtgcccgtcggtcgtgtcgagaccggtatcatcaaggccggtatggtcgtcaccttcgcccccgctggtgtcaccactgaagtcaagtccgtcgagatgcaccacgagcagctcaccgagggtgtccccggtgacaacgtcggcttcaacgtcaagaacgtctccgtcaaggagatccgtcgtggtaacgttgccggtgactccaagaacgacccccccaagggtgccgagtccttcaacgcccaggtcatcgtcctcaaccaccctggtcaggtcggtgctggttacgccccagtcctcgactgccacaccgcccacattgcttgcaagttctctgagctcctcgagaagattgaccgccgtaccggaaagtctgttgagaactctcccaagttcatcaagtccggtgacgccgccatcgtcaagatggttccctccaagcccatgtgcgttgaggctttcactgactaccctcctctcggtcgtttcgctgtccgtga

SEQ ID NO: 402 - DNA, 1283 bp, Aspergillus flavus
  ref <308>: DATABASE ACCESSION NUMBER: ATCC 26947
caagctcaagtccgagcgtgagcgtggtatcaccatcgatatcgccctctggaagttccagacctccaagtatgaggtcaccgtcattggtaagcatttgagttccaacctacgttgcccaacatttacagtcatctaacaaagttcaatagatgcccccggtcaccgtgacttcatcaagaacatgatcactggtacttcccaggctgactgcgctatcctcatcattgcctccggtactggtgaattcgaggctggtatctccaaggatggtcagacccgtgagcacgctctgctcgctttcaccctcggtgtccgtcagctcatcgttgccctcaacaagatggacacctgcaagtggtctcaggatcgttacaacgaaatcgttaaggagacttccaacttcatcaagaaggtcggatacaaccccaagagcgttcctttcgtccccatctccggtttcaacggtgacaacatgattgaggcctccaccaactgcccctggtacaagggttgggagaaggagaccaaggctggcaagtccaccggtaagacccttctcgaggccatcgatgccatcgagccccccgtccgtcccaccgacaagcctctccgtcttcccctycaggatgtctacaagatctctggtatcggtactgtgcccgtcggtcgtgtcgagactggtgtcatcaagcctggtatggtcgttactttcgctcctgccaacgtgaccactgaagtcaagtccgttgaaatgcaccaccagcagctccaggccggtaaccccggtgacaacgttggtttcaacgtcaagaacgtctccgtcaaggaagtccgccgtggtaacgttgccggtgactccaagaacgacccccctgctggctgcgattccttcaacgcccaggtcatcgtccttaaccaccccggtcaggtcggcaacggttacgctcccgtcctggactgccacaccgctcacattgcttgcaagttcgctgagctccttgagaagattgaccgccgtaccggtaaatctgttgaggacaagcccaagttcatcaagtctggtgatgctgccatcgtcaagatgattccctccaagcccatgtgtgtggagtctttcactgacttcccccctcttggtcgtttcgctgtccgtgacgtaagtttttccctcttgactatcttcacaatttttcacatattttcacgcctcgtcccactctttttcctcccttcctctttggttcccctttttgcctgcaagttctctatagctaacatga

SEQ ID NO: 403 - DNA, 1103 bp, Aspergillus fumigatus
  strain DAL-95
tccgagcgtgagcgtggtatcaccatcgacattgccctctggaagttccagactcccaagtatgaggtcactgtcatcggtaagctcgactcgccccgatatgttttggtgctgtagctaacacgatctgaagatgcccccggtcaccgtgacttcatcaagaacatgatcactggtacctcccaggctgactgcgctatcctcatcattgcctccggtactggtgagttcgaggctggtatctccaaggatggccagacccgtgagcacgctctgctggctttcaccctcggtgtcaagcagctcatcgtcgccctcaacaagatggacacctgcaagtggtccgaggatcgttacaacgaaattgtcaaggaaacctccaacttcatcaagaaggtcggctacaaccccaaggccgttcccttcgtccccatctctggcttcaacggtgacaacatgcttgagccctcctccaactgcccctggtacaagggatgggagaaggagaccaaggccggcaaggtcactggtaagaccctcatcgaggccatcgacgccattgagccccctgtccgtccctccaacaagcccctccgtcttcccctccaggatgtctacaagatctctggtatcggaacggtccctgtcggccgtgtcgagaccggtatcatcaagcccggcatggtcgtcaccttcgcccccgccaacgtcaccactgaagtcaagtccgtcgagatgcaccaccagcagctccaggagggtgtccccggtgacaacgtcggtttcaacgtcaagaacgtttccgtcaaggaagtccgccgtggtaacgtctgcggtgactccaagaacgatccccctcagggtgctgcctccttcaacgcccaggtcatcgtcctcaaccaccccggtcaggtcggcgctggttacgcccccgtcctcgactgccacactgcccacattgcttgcaagttctctgagctgcttgagaagattgaccgccgtaccggcaagtctgttgagaacaaccccaagttcatcaagtccggtgatgccgccatcgtgaagatggttccttccaagcccatgtgtgtcgagtccttcac

SEQ ID NO: 404 - DNA, 1149 bp, Aspergillus fumigatus
  strain WSA-172
aagctcaagtccgagcgtgagcgtggtatcaccatcgacattgccctctggaagttccagactcccaagtatgaggtcactgtcatcggtaagctcgactcgccccgatatgttttggtgctgtagctaacacgatctgaagatgcccccggtcaccgtgacttcatcaagaacatgatcactggtacctcccaggctgactgcgctatcctcatcattgcctccggtactggtgagttcgaggctggtatctccaaggatggccagacccgtgagcacgctctgctggctttcaccctcggtgtcaagcagctcatcgtcgccctcaacaagatggacacctgcaagtggtccgaggatcgttacaacgaaattgtcaaggaaacctccaacttcatcaagaaggtcggctacaaccccaaggccgttcccttcgtccccatctctggcttcaacggtgacaacatgcttgagccctcctccaactgcccctggtacaagggatgggagaaggagaccaaggccggcaaggtcactggtaagaccctcatcgaggccatcgacgccattgagccccctgtccgtccctccaacaagcccctccgtcttcccctccaggatgtctacaagatctctggtatcggaacggtccctgtcggccgtgtcgagaccggtatcatcaagcccggcatggtcgtcaccttcgcccccgccaacgtcaccactgaagtcaagtccgtcgagatgcaccaccagcagctccaggagggtgtccccggtgacaacgtcggtttcaacgtcaagaacgtttccgtcaaggaagtccgccgtggtaacgtctgcggtgactccaagaacgatccccctcagggtgctgcctccttcaacgcccaggtcatcgtcctcaaccaccccggtcaggtcggcgctggttacgcccccgtcctcgactgccacactgcccacattgcttgcaagttctctgagctgcttgagaagattgaccgccgtaccggcaagtctgttgagaacaaccccaagttcatcaagtccggtgatgccgccatcgtgaagatggttccttccaagcccatgtgtgtcgagtccttcactgactacccccctctgggtcgtttcgccgtccgtgac

SEQ ID NO: 405 - DNA, 1151 bp, Aspergillus niger
  ref <308>: DATABASE ACCESSION NUMBER: ATCC 9508
caagctcaagtccgagcgtgagcgtggtatcaccatcgacattgccctctggaagttccagactggcaagtatgaggtcaccgtcattggtatgtactcacagagttctcttttcatcaaagcaatatactaacgtccatcatagacgcccccggtcaccgtgacttcatcaagaacatgatcactggtacctcccaggctgactgcgctatcctcatcattgcctccggtactggtgagttcgaggctggtatctccaaggatggccagactcgtgagcacgctctgcttgctttcaccctcggtgtccgccagctcatcgttgccctcaacaagatggacacctgcaagtggtccgaggaccgttacaacgaaatcgttaaggagacctccaacttcatcaagaaggtcggatacaaccccaagggtgttcctttcgtccccatctccggtttcaacggtgacaacatgctcgagccctcccccaactgcccctggtacaagggttgggagaaggagaccaaggccggcaaggtcaccggtaagaccctccttgaggccatcgacgccatcgagccccccgtccgtccctccaacaagcccctccgtcttcccctccaggatgtctacaagatctccggtattggaactgttcccgtcggtcgtgtcgagaccggtatcattgcccctggtatggtcgtgaccttcgctcccgccaacgtcaccactgaagtcaagtccgttgagatgcaccaccagcagctcaaggaaggtgtccccggtgacaacgttggtttcaacgtcaagaacgtttccgtcaaggaggttcgccgtggtaacgttgccggtgactccaagaacgacccccctcttggctgtgagagcttcaccgcccaggtcatcgtcctcaaccaccccggtcaggtcggcgctggttacgctcccgtcctggactgccacactgctcacattgcttgcaagttcgctgagctccttgagaagattgaccgccgtaccggaaagtctgttgaatcttcccccaagttcatcaagtccggtgacgctgccatcgtcaagatgattccctccaagcccatgtgtgttgaggctttcactgactacccccctcttggtcgtttcgccgtccgcga

SEQ ID NO: 406 - DNA, 1093 bp, Blastoschizomyces capitatus
  ref <308>: DATABASE ACCESSION NUMBER: ATCC 10663
gcttaaagctgaacgtgaacgtggtatcaccattgatatcgctctctggaagttcgaaactcctaagtactacgttactgttattgatgctccaggtcaccgtgatttcatcaagaacatgattactggtacttcccaagccgattgcgccattcttatcattgctgccggtgtcggtgaattcgaagctggtatctccaaggaaggtcaaaccagagaacacgctcttctcgctttcacccttggtgtcagacaacttatcattgccatcaacaagatggactctgtcaagtgggaccaaaagagatacgaagaaatcgtcaaggaggcttccaacttcgtcaagaaggttggttacaaccccaagtctgttccattcgttcctatctctggttggaacggtgacaacatgttggaacctaccaccaacgccccatggtacaagggatggaccaaggaaaccaaggctggtgccactaagggtatgactcttattgaagccattgacgccattgaaccaccagtaagaccatccgacaagccactccgtctcccactccaagatgtttacaagattggtggtatcggaactgtgccagtcggccgtgtcgaaaccggtatcatcaaggccggtatggtcgttacctttgctccaccaatggtcacaactgaagttaagtccgttgaaatgcaccacgaacaacttgctcaaggtaacccaggtgacaacgttggtttcaacgtcaagaacgtttccgttaaggaaatcagacgtggtaacgtctgtggtgactccaagaacgatccaccaaagggctgcgaatctttcaacgctcaagttatcgtcttgaaccaccctggtcaaatctctgctggttactctccagttctcgattgccacactgcccacattgcctgcagattcgacgaactccttgaaaagatcgaccgtcgttctggtaagaagattgaagactctccaaagtttgtcaagtctggtgatgccgctatcgtcaagatgatcccaaccaagccaatgtgcgttgaaaccttcactgaatacccaccacttggtcgtttcgccgtccgtgat

SEQ ID NO: 407 - DNA, 1101 bp, Candida albicans
  ref <308>: DATABASE ACCESSION NUMBER: ATCC 10231
cttggacaaattgaaggctgaaagagaaagaggtatcaccattgatatcgctttgtggaaattcgaaactccaaaataccacgttaccgtcattgatgctccaggtcacagagatttcatcaagaatatgatcactggtacttctcaagctgattgtgctattttgattattgctggtggtactggtgaattcgaagccggtatttctaaggatggtcaaaccagagaacacgctttgttggcttacactttgggtgtcaaacaattgattgttgctgtcaacaagatggactctgtcaaatgggacaaaaacagatttgaagaaatcatcaaggaaacctccaacttcgtcaagaaggttggttacaacccaaagactgttccattygttccaatctctggttggaatggtgacaacatgattgaaccatccaccaactgtccatggtacaagggttgggaaaaggaaaccaaatccggtaaagttactggtaagaccttgttagaagctattgacgctattgaaccaccaaccagaccaaccgacaaaccattgagattgccattgcaagatgtttacaagatcggtggtattggtactgtgccagtcggtagagttgaaactggtatcatcaaagccggtatggttgttactttcgccccagctggtgttaccactgaagtcaaatccgttgaaatgcatcacgaacaattggctgaaggtgttccaggtgacaatgttggtttcaacgttaagaacgtttccgttaaagaaattagaagaggtaacgtttgtggtgactccaagaacgatccaccaaagggttgtgactctttcaatgcccaagtcattgttttgaaccatccaggtcaaatctctgctggttactctccagtcttggattgtcacactgcccacattgcttgtaaattcgacactttggttgaaaagattgacagaagaactggtaagaaattggaagaaaatccaaaattcgtcaaatccggtgatgctgctatcgtcaagatggtcccaaccaaaccaatgtgtgttgaagctttcactgactacccaccattaggtagattcgctgtcagaga

SEQ ID NO: 408 - DNA, 1089 bp, Candida albicans
  ref <308>: DATABASE ACCESSION NUMBER: ATCC 18804
gaaggctgaaagagaaagaggtatcaccattgatatcgctttgtggaaattcgaaactccaaaataccacgttaccgtcattgatgctccaggtcacagagatttcatcaagaatatgatcactggtacttctcaagctgattgtgctattttgattattgctggtggtactggtgaattcgaagccggtatttctaaggatggtcaaaccagagaacacgctttgttggcttacactttgggtgtcaaacaattgattgttgctgtcaacaagatggactctgtcaaatgggacaaaaacagatttgaagaaatcatcaaggaaacctccaacttcgtcaagaaggttggttacaacccaaagactgttccattcgttccaatctctggttggaatggtgacaacatgattgaaccatccaccaactgtccatggtacaagggttgggaaaaggaaaccaaatccggtaaagttactggtaagaccttgttagaagctattgacgctattgaaccaccaaccagaccaaccgacaaaccattgagattgccattgcaagatgtttacaagatcggtggtattggtactgtgccagtcggtagagttgaaactggtatcatcaaagccggtatggttgttactttcgccccagctggtgttaccactgaagtcaaatccgttgaaatgcatcacgaacaattggctgaaggtgttccaggtgacaatgttggtttcaacgttaagaacgtttccgttaaagaaattagaagaggtaacgtttgtggtgactccaagaacgatccaccaaagggttgtgactctttcaatgcccaagtcattgttttgaaccatccaggtcaaatctctgctggttactctccagtcttggattgtcacactgcccacattgcttgtaaattcgacactttggttgaaaagattgacagaagaactggtaagaaattggaagaaaatccaaaattcgtcaaatccggtgatgctgctatcgtcaagatggtcccaaccaaaccaatgtgtgttgaagctttcactgactacccaccattaggtagattcgctgtcagaga

SEQ ID NO: 409 - DNA, 1101 bp, Candida albicans
  ref <308>: DATABASE ACCESSION NUMBER: ATCC 56884
cttggacaaattgaaggctgaaagagaaagaggtatcaccattgatatcgctttgtggaaattcgaaactccaaaataccacgttaccgtcattgatgctccaggtcacagagatttcatcaagaatatgatcactggtacttctcaagctgattgtgctattttgattattgctggtggtactggtgaattcgaagccggtatttctaaggatggtcaaaccagagaacacgctttgttggcttacactttgggtgtcaaacaattgattgttgctgtcaacaagatggactctgtcaaatgggacaaaaacagatttgaagaaatcatcaaggaaacctccaacttcgtcaagaaggttggttacaacccaaagactgttccattcgttccaatctctggttggaatggtgacaacatgattgaaccatccaccaactgtccatggtacaagggttgggaaaaggaaaccaaatccggtaaagttactggtaagaccttgttagaagctattgacgctattgaaccaccaaccagaccaaccgacaaaccattgagattgccattgcaagatgtttacaagatcggtggtattggtactgtgccagtcggtagagttgaaactggtatcatcaaagccggtatggttgttactttcgccccagctggtgttaccactgaagtcaaatccgttgaaatgcatcacgaacaattggctgaaggtgttccaggtgacaatgttggtttcaacgttaagaacgtttccgttaaagaaattagaagaggtaacgtttgtggtgactccaagaacgatccaccaaagggttgtgactctttcaatgcccaagtcattgttttgaaccatccaggtcaaatctctgctggttactctccagtcttggattgtcacactgcccacattgcttgtaaattcgacactttggttgaaaagattgacagaagaactggtaagaaattggaagaaaatccaaaattcgtcaaatccggtgatgctgctatcgtcaagatggtcccaaccaaaccaatgtgtgttgaagctttcactgactacccaccattaggtagattcgctgtcagaga

SEQ ID NO: 410 - DNA, 1102 bp, Candida albicans
  ref <308>: DATABASE ACCESSION NUMBER: ATCC 60193
cttggacaaattgaaggctgaaagagaaagaggtatcaccattgatatcgctttgtggaaattcgaaactccaaaataccacgttaccgtcattgatgctccaggtcacagagatttcatcaagaatatgatcactggtacttctcaagctgattgtgctattttgattattgctggtggtactggtgaattcgaagccggtatttctaaggatggtcaaaccagagaacacgctttgttggcttacactttgggtgtcaaacaattgattgttgctgtcaacaagatggactctgtcaaatgggacaaaaacagatttgaagaaatcatcaaggaaacctccaacttcgtcaagaaggttggttacaacccaaagactgttccattcgttccaatctctggttggaatggtgacaacatgattgaaccatccaccaactgtccatggtacaagggttgggaaaaggaaaccaaatccggtaaagttactggtaagaccttgttagaagctattgacgctattgaaccaccaaccagaccaaccgacaaaccattgagattgccattgcaagatgtttacaagatcggtggtattggtactgtgccagtcggtagagttgaaactggtatcatcaaagccggtatggttgttactttcgccccagctggtgttaccactgaagtcaaatccgttgaaatgcatcacgaacaattggctgaaggtgttccaggtgacaatgttggtttcaacgttaagaacgtttccgttaaagaaattagaagaggtaacgtttgtggtgactccaagaacgatccaccaaagggttgtgactctttcaatgcccaagtcattgttttgaaccatccaggtcaaatctctgctggttactctccagtcttggattgtcacactgcccacattgcttgtaaattcgacactttggttgaaaagattgacagaagaactggtaagaaattggaagaaaatccaaaattcgtcaaatccggtgatgctgctatcgtcaagatggtcccaaccaaaccaatgtgtgttgaagctttcactgactacccaccattaggtagattcgctgtcagagat

SEQ ID NO: 411 - DNA, 1102 bp, Candida albicans; identical to SEQ ID NO: 410
  ref <308>: DATABASE ACCESSION NUMBER: ATCC 90028

SEQ ID NO: 412 - DNA, 1101 bp, Candida dubliniensis
  strain NCPF 3108
cttggataaattgaaggctgaaagagaaagaggtatcaccattgatatcgctttgtggaaattcgaaactccaaaataccacgttaccgtcattgatgctccaggtcacagagatttcatcaagaacatgatcactggtacttctcaagctgattgtgctattttgattattgctggtggtactggtgaattcgaagccggtatttctaaggatggtcaaaccagagaacacgctttgttggcttacactttgggtgtcaaacaattgattgttgctgtcaacaagatggactctgtcaaatgggacaaaaacagatttgaagaaatcatcaaggaaacctctaacttcgtcaagaaggttggttacaacccaaagactgttccattcgttccaatctctggttggaatggtgacaacatgattgaagcttccaccaactgtccatggtacaagggttgggaaaaggaaaccaaatccggtaaggttactggtaagaccttgttagaagctattgatgctattgaaccaccaaccagaccaaccgacaaaccattgagattgccattgcaagatgtttacaagatcggtggtattggtactgtgccagtcggtagagttgaaactggtgtcattaaagccggtatggttgtcacttttgccccagctggtgttaccactgaagtcaaatccgttgaaatgcatcacgaacaattggctgaaggtgttccaggtgacaatgttggtttcaacgttaagaatgtttctgtcaaagaaattagaagaggtaacgtttgtggtgactccaagaacgatccaccaaagggttgtgactctttcaatgcccaagtcattgtcttgaaccatccaggtcaaatctctgctggttactctccagtcttggattgtcacactgcccacattgcttgtaaattcgacactttggttgaaaagattgacagaagaactggtaagaaattggaagaaaatccaaaattcgtcaaatccggtgacgctgctatygtcaagatggtcccaaccaaaccaatgtgtgttgaagctttcactgactacccaccattaggtagattcgctgtcagaga

SEQ ID NO: 413 - DNA, 1098 bp, Candida catenulata
  ref <308>: DATABASE ACCESSION NUMBER: ATCC 10565
ggacaagcttaaggctgagcgtgagagaggtatcaccattgacattgccttgtggaagttcgagactcccaagtaccacgtcactgtcattgacgcccccggtcacagagatttcatcaagaacatgatcactggtacctcgcaggctgactgtgctatcttgatcattgcttccggtgtcggtgagttcgaggctggtatctccaaggacggtcagacccgtgagcacgccttgttggcctacaccttgggtgtcaagcagttgatcgttgccatcaacaagatggactccgtcaagtgggacaagaacagattcgaggagattgtcaaggagaccaccaacttcgtcaagaaggttggttacaaccccaaggctgtccccttcgtccccatctctggctggaacggtgacaacatgattgaggcctccaccaactgcccctggtacaagggctgggagaaggagaccaaggccggtaagtctaccggtaagaccttgttggaggccattgacgccattgagccccctaccagacccaccgacaagcccttgagattgcccttgcaggatgtctacaagatcggtggtattggtacggtgcccgtcggccgtgtcgagaccggtgtcatcaagcccggtatggtcgtcaccttcgcccccgctggtgtcaccactgaagtcaagtccgtcgagatgcaccacgagcagttgtccgagggtgtccccggtgacaacgttggtttcaacgtcaagaacgtctctgttaaggagatcagacgtggtaacgtctgcggtgactccaagaacgacccccccatgggttgctcttctttcaacgcccaggttatcgtgttgaaccaccccggtcagatctctgccggttactctcccgtcttggactgccacaccgcccacattgcttgcaagttcgccgagttgatcgagaagattgacagacgtaccggtaagtccatggaggctaaccccaagttcgtcaagtctggtgacgccgccatcgtcaagatggagcccactaagcccatgtgtgttgaggccttcactgacttccctcctttgggtagattcgccgtcagaga

SEQ ID NO: 414 - DNA, 1102 bp, Candida dubliniensis
  strain NCPF 3949
cttggataaattgaaggctgaaagagaaagaggtatcaccattgatatcgctttgtggaaattcgaaactccaaaataccacgttaccgtcattgatgctccaggtcacagagatttcatcaagaacatgatcactggtacttctcaagctgattgtgctattttgattattgctggtggtactggtgaattcgaagccggtatttctaaggatggtcaaaccagagaacacgctttgttggcttacactttgggtgtcaaacaattgattgttgctgtcaacaagatggactctgtcaaatgggacaaaaacagattcgaagaaatcatcaaggaaacctctaacttcgtcaagaaggttggttacaacccaaagactgttccattcgttccaatctctggttggaatggtgacaacatgattgaagcttccaccaactgtccatggtacaagggttgggaaaaggaaaccaaatccggtaaggttactggtaagaccttgttagaagctattgatgctattgaaccaccaaccagaccaaccgacaaaccattgagattgccattgcaagatgtttacaagatcggtggtattggtactgtgccagtcggtagagttgaaactggtgtcattaaagccggtatggttgtcacttttgccccagctggtgttaccactgaagtcaaatccgttgaaatgcatcacgaacaattggttgaaggtgttccaggtgacaatgttggtttcaacgttaagaatgtttctgtcaaagaaattagaagaggtaacgtttgtggtgactccaagaacgatccaccaaagggttgtgactctttcaatgcccaagtcattgtcttgaaccatccaggtcaaatctctgctggttaytctccagtcttggattgtcacactgcccacattgcttgtaaattcgacactttggttgaaaagattgacagaagaactggtaagaaattggaagaaaatccaaaattcgtcaaatccggtgacgctgctatygtcaagatggtcccaaccaaaccaatgtgtgttgaagctttcactgactacccaccattaggtagattcgctgtcagagat

SEQ ID NO: 415 - DNA, 1102 bp, Candida dubliniensis
  CBS 7987
cttggataaattgaaggctgaaagagaaagaggtatcaccattgatatcgctttgtggaaattcgaaactccaaaataccacgttaccgtcattgatgctccaggtcacagagatttcatcaagaacatgatcactggtacttctcaagctgattgtgctattttgattattgctggtggtactggtgaattcgaagccggtatttctaaggatggtcaaaccagagaacacgctttgttggcttacactttgggtgtcaaacaattgattgttgctgtcaacaagatggactctgtcaaatgggacaaaaacagattygaagaaatcatcaaggaaacctctaacttcgtcaagaaggttggttacaacccaaagactgttccattcgttccaatctctggttggaatggtgacaacatgattgaagcttccaccaactgtccatggtacaagggttgggaaaaggaaaccaaatccggtaaggttactggtaagaccttgttagaagctattgatgctattgaaccaccaaccagaccaaccgacaaaccattgagattgccattgcaagatgtttacaagatcggtggtattggtactgtgccagtcggtagagttgaaactggtgtcattaaagccggtatggttgtcacttttgccccagctggtgttaccactgaagtcaaatccgttgaaatgcatcacgaacaattggttgaaggtgttccaggtgacaatgttggtttcaacgttaagaatgtttctgtcaaagaaattagaagaggtaacgtttgtggtgactccaagaacgatccaccaaagggttgtgactctttcaatgcccaagtcattgtcttgaaccatccaggtcaaatctctgctggttaytctccagtcttggattgtcacactgcccacattgcttgtaaattcgacactttggttgaaaagattgacagaagaactggtaagaaattggaagaaaatccaaaattcgtcaaatccggtgacgctgctatygtcaagatggtcccaaccaaaccaatgtgtgttgaagctttcactgactacccaccattaggtagattcgctgtcagagat

SEQ ID NO: 416 - DNA, 1094 bp, Candida famata
  ref <308>: DATABASE ACCESSION NUMBER: ATCC 62894
aattgaaggctgaaagagaaagaggtatcaccattgatatcgctttatggaaattcgaaactccaaaataccacgttaccgttattgatgctccaggtcacagagatttcatcaagaacatgattactggtacttctcaagctgattgtgctattttrattattgctggtggtgtcggtgaattcgaagccggtatctctaaggatggtcaaaccagagaacacgctttattggcttacaccttaggtgttagacaattgattgttgccgtcaacaagatggactctgttaaatgggacaaggctagattcgaagaaatcatcaaggaaacctctaacttcgtcaagaaggttggttacaaccctaagactgttcctttcgtyccaatttctggatggaacggtgacaacatgattgaagcctccaccaactgtccatggtacaagggttgggaaaaggaaaccaaggctggtaaatctactggtaagactttgttagaagccattgatgccattgaaccaccaaccagaccaaccgaaaagccattgagattaccattacaagatgtctacaagatcggtggtattggtactgtgccagtcggtagagttgaaaccggtgttatcaagggtggtatggttgttacctttgccccagccggtgtcactaccgaagtcaaatccgttgaaatgcaccacgaacaattagctgaaggtgttccaggtgacaatgttggtttcaacgtcaagaacgtttccgttaaggaaatcagaagaggtaacgtttgtggtgactccaagaacgacccaccaaagggtgctgaatctttcaccgctcaagttattgtcttgaaccacccaggtcaratctctgctggttactctccagtcttagattgtcacaccgcccacattgcttgtaaattcgatgctttactcgaaaagattgacagaagatccggtaagaaattagaagacgaaccaaaattcgtcaagtccggtgatgctgctatcgtcaagatggtcccaaccaaaccaatgtgtgttgaagctttcactgaatacccaccattaggtagattcgctgttagagat

SEQ ID NO: 417 - DNA, 1101 bp, Candida glabrata
  ref <308>: DATABASE ACCESSION NUMBER: ATCC 66032
tttggacaagttgaaggctgaaagagaaagaggtatcactatcgatatcgctttgtggaagttcgaaactccaaagtaccacgtyaccgttatcgatgcyccaggtcacagagatttcatcaagaacatgattactggtacttctcaagctgactgtgctatcttgattattgctggtggtgtcggtgaattcgaagcyggtatctccaaggatggtcaaaccagagaacacgctctattggctttcaccctaggtgttagacaattgattgtygctgtcaacaagatggactctgtcaagtgggatgaatccagattcgctgaaatcgttaaggaaacctccaacttcatcaagaaggtcggttacaacccaaagactgttccattcgtcccaatctctggttggaacggtgacaacatgattgaagccaccaccaacgcttcctggtacaagggttgggaaaaggaaaccaaggctggtgtcgtcaagggtaagaccttgttggaagccattgacgctatcgaaccaccaaccagaccaactgacaagccattgagattgccattgcaagatgtctacaagatcggtggtatcggtacggtgccagtcggtagagtcgaaaccggtgtcatcaagccaggtatggttgttaccttcgccccagctggtgttaccactgaagtcaagtccgttgaaatgcaccacgaacaattgactgaaggtttgccaggtgacaacgttggtttcaacgttaagaacgtttccgttaaggaaatcagaagaggtaatgtctgtggtgactccaagaacgacccaccaaaggctgctgcttctttcaacgctaccgtcattgtcttgaaccacccaggtcaaatctctgctggttactctccagttttggactgtcacaccgcccacattgcttgtaagttcgaagaattgttggaaaagaacgacagaagatccggtaagaagttggaagactctccaaagttcttgaagtccggtgacgctgctttggttaagttcgttccatccaagccaatgtgtgtcgaagctttctccgactacccaccattgggtagattcgctgtcagaga

SEQ ID NO: 418 - DNA, 1080 bp, Candida guilliermondii
  ref <308>: DATABASE ACCESSION NUMBER: ATCC 6260
agagaaagaggtatcaccattgacattgctttgtggaaattcgagactccaaagtaccacgttacygtcattgatgccccaggtcacagagatttcatcaagaacatgatcactggtacttctcaagctgactgtgctattttgattattgctggtggtaccggtgaattcgaagctggtatctctaaggatggtcaaaccagagagcacgctttgttggcttacaccttgggtgttagacaattgattgttgctgtcaacaagatggactccgtcaartgggacaagaacagattygaggaaatcatcaaggaaacctctaacttcgtcaagaaggttggttacaaccctaagactgtgccattcgttcctatctctggatggaayggtgacaacatgattgaggcttctaccaactgtccttggtacaagggatgggagaaggagaccaaggctggtaagtccaccggtaagactttgttggaggccattgacgccattgagccacctcaaagaccaaccgacaagccattgagattgccattgcaagatgtytacaagattggtggtattggaacggtgccagtcggtagagttgaaaccggtatcatyaaggccggtatggttgttacctttgccccagctggtgtyaccactgaagtcaagtccgtggaaatgcaccacgaacaattggttgaaggtgttccaggtgacaatgttggtttcaacgttaagaacgtttccgttaaggaaattagaagaggtaacgtttgtggtgactccaagaacgacccaccaaagggttgtgactctttcaccgctcaagttattgtgttgaaccaccctggtcaaatctctgctggttactctccagttttggactgtcacaccgcccacattgcttgtaaattcgacaccttgttggagaagattgacagaagaaccggtaagaagatggaggacaaccccaagtttgtcaagtccggtgacgcttctatcgtcaagatggtgccatccaagccaatgtgtgttgaggctttcaccgactacccaccattgggaagattcgccgtcagagac

SEQ ID NO: 419 - DNA, 751 bp, Candida haemulonii
  ref <308>: DATABASE ACCESSION NUMBER: ATCC 22991
tctgtcaagtgggacaaggccagatacgaggaaatcgtcaaggagacctctaacttcgtcaagaaggttggttacaaccctaagactgttccattcgtcccaatctctggttggaacggtgacaacatgattgaggcttctaccaactgtgactggtacaagggttgggagaaggagaccaagtctggtaagtccaccggtaagaccttgttggaggccattgacgccattgagccaccaaccagaccaaccgacaagccattgagattgccattgcaggatgtctacaagattggtggtatcggaactgtgccagtcggcagagttgagaccggtgttatcaaggccggtatggttgtcaccttcgccccagctggtgtcaccactgaagtcaagtctgtcgagatgcaccacgagcagttgccagagggtgtcccaggtgacaacgttggtttcaacgtcaagaacgtttccgttaaggaaatcagaagaggtaacgtctgtggtgactccaagcaggacccaccaaagggctgtgactctttcaccgctcaggttattgtgttgaaccacccaggtcagatctcttctggttactctccagttttggactgtcacactgcccacattgcttgtaagttcgacaccttggttgagaagatcgacagaagaaccggtaagaagttggaagatgagccaaagttcatcaagtccggtgacgctgctatcgtcaagatggtcccaaccaagc

SEQ ID NO: 420 - DNA, 1102 bp, Candida inconspicua
  ref <308>: DATABASE ACCESSION NUMBER: ATCC 16783
tcttgacaagttaaaggctgaaagagaaagaggtatcactattgatattgctttatggaaattcgaaactccaaagtatcacgttaccgtcattgatgctccaggtcacagagatttcattaagaacatgattactggtacttctcaagcagattgtgctattttgattattgctggtggtgtcggtgaattcgaagctggtatttccaaggatggtcaaactagagaacacgctttattagcattcaccttaggtgttaagcaattgattgttgctatcaacaagatggattctgttaagtgggatgaaaagagatttgaagaaattgtcaaggaaacccaaaacttcatcaagaaggttggttacaacccaaagactgttccattcgttccaatttctggttggaatggtgacaacatgattgaaccatcttctaactgtccatggtacaagggttggactaaggaaaccaaggcaggtgttgtcaagggtaagaccttattagaagctattgatgctattgaaccacctgtcagaccaactgataagccattaagattaccattacaagatgtttacaagattggtggtattggtactgtgccagtcggtagagttgaaaccggtattattaagccaggtatggttgttgttttcgcaccatctggtgttaccactgaagtcaagtccgttgaaatgcaccatgaacaattagaagaaggtgtcccaggtgacaatgttggtttcaacgtcaagaacgtctctgttaaggatatcaagagaggtaacgtttgtggtgactccaagaatgacccaccacaaggttgtgcttccttcaatgctcaagtcattgtcttgaaccaccctggtcaaatttctgctggttactctccagttttagattgtcacactgcccacattgcatgtaaattcgatgaattaattgaaaagattgacagaagaactggtaagtccgttgaagaccatccaaagtctgttaagtctggtgatgcagctatcgttaagatggttccaaccaagccaatgtgtgttgaagctttcactgaatacccaccattaggtagattcgcagtcagagat

SEQ ID NO: 421 - DNA, 1099 bp, Candida kefyr
  ref <308>: DATABASE ACCESSION NUMBER: ATCC 28838
tggacaagttaaaggctgaaagagaaagaggtatcaccatcgatatcgctttgtggaagttcgaaactccaaagtaccaagttaccgttatcgatgctccaggtcacagagatttcatcaagaacatgattactggtacttctcaagctgactgtgctatcttgattattgctggtggtgtcggtgaattcgaagccggtatctccaaggatggtcaaaccagagaacacgctttgttggcttacaccttgggtgttagacaattgattgttgctatcaacaagatggactctgttaagtgggatgaatctcgttaccaagaaattgttaaggaaacctccaacttcatcaagaaggtcggttacaacccaaagaatgttccattcgtcccaatctctggttggaacggtgacaacatgattgaagccaccaccaacgctccatggtacaagggttgggaaaaggaaaccaaggctggtaccgtcaagggtaagaccttgttggaagctattgacgctatcgaaccaccaaccagaccaactgacaagccattgagattgccattgcaagatgtctacaagatcggtggtattggtactgtgccagtcggtagagtcgaaaccggtgtcatcaagccaggtatggttgttaccttcgccccagccggtgtcactaccgaagttaagtccgtcgaaatgcaccacgaacaattggaagaaggtctaccaggtgacaacgtcggtttcaacgtcaagaacgtttccgttaaggaaatcagaagaggtaacgtctgtggtgactccaagaacgatccaccaaaggctgctgcttctttcaacgccactgttatcgtcttgaaccacccaggtcaaatctctgctggttactctccagttttggattgtcacactgctcacattgcttgtaagttcgacgaattgttggaaaagaacgacagaagatccggtaagaagttggaagactctccaaagttcttgaagtctggtgacgctgctttggttaagttcgttccatctaagccaatgtgtgttgaagcattctctgactacccaccattgggtagattcgctgtcagaga

SEQ ID NO: 422 - DNA, 1095 bp, Candida krusei
  ref <308>: DATABASE ACCESSION NUMBER: ATCC 34135
aagttaaaggcagaaagagaaagaggtatcactattgatattgctttatggaagttygaaactccaaartaccacgttaccgttattgatgctccaggtcacagagatttcatcaagaacatgattaccggtacttctcaagctgattgtgctattttgattattgctggtggtgtcggtgaattcgaagctggtatctccaaggatggtcaaactagagaacacgctctattggctttcaccttaggtgttagacaattgattgttgctatcaacaagatggattccgttaartgggatgaaaacagatttgaagaaattgtcaaggaaacccaaaacttcatcaagaaggttggttacaacccaaagactgttccattcgttccaatytctggttggaatggtgacaacatgattgaagcatccaccaactgtccatggtacaagggttggactaaggaaaccaaggcaggtgttgttaagggtaagaccttattagaagcaatcgatgctattgaaccacctgtcagaccaaccgaaaagccattaagattaccattacaagatgtttacaagattggtggtattggtactgtgccagtcggtagagtcgaaaccggtgtcattaagccaggtatggttgtcacttttgctccagcaggtgtcaccaccgaagtcaagtccgttgaaatgcaccatgaacaattagaacaaggtgttccaggtgataacgttggtttcaacgttaagaacgtttctgtcaaggatatcaagagaggtaacgtttgtggtgactccaagaacgacccaccaatgggtgcagcttccttcaatgctcaagtcattgtcttgaaccaccctggtcaaatttccgctggttactctccagtcttggattgtcacactgcccacattgcatgtaagttcgacgaattaatcgaaaagattgacagaagaactggtaagtctgttgaagaccatccaaagtcygtcaagtctggtgatgcagctatcgtcaagatggtcccaaccaagccaatgtgtgttgaagctttcactgaatayccaccattaggtagattcgcagtcagagat

SEQ ID NO: 423 - DNA, 1104 bp, Candida lambica
  ref <308>: DATABASE ACCESSION NUMBER: ATCC 24750
cttggacaagcttaaggctgaaagagaaagaggtatcaccattgatatcgctttatggaagttcgaaactccaaagtaccacgttaccgtcattgacgctccaggtcacagagatttcatcaagaacatgattactggtacctctcaagcagattgtgctattttratyattgctggtggtgtcggtgaattcgaagctggtatctctaaggatggtcaaaccagagaacacgctcttcttgcattcactcttggtgttagacaattgattgttgctatcaacaagatggactctgtcaagtgggacgaatccagattcgatgaaatttgtaaggaaaccgcwaacttcatcaagaaggttggttacaacccaaagactgttccattcgtcccaatctctggttggaacggtgacaacatgattgaaccatctgctaactgtccatggtacaagggatggactaaggaaaccaaggcttccggtgtcgtcaagggtaagacccttcttgaagcaattgatgctattgagccacctgtcagaccaactgacaaggctttgagattgccattrcaagatgtctacaagattggtggtattggtactgtgccagtcggtagagttgaaaccggtatcatcaagccaggtatgattgtcgttttcgctccaaccggtgttactactgaagttaagtccgttgaaatgcaccatgaacaattagaagaaggtgtcccaggtgacaatgttggtttcaacgtcaagaacgtctctgttaaggatattaagagaggtaacgtctgtggtgactccaagaacgacccaccaatgggttgtgcttccttcaatgctcaagtcattgttcttaaccacccaggtcaaatttctgctggttactcaccagttcttgactgtcacactgcccacattgcatgtaagttcgaygaattactcgaaaagattgacagaagaaccggtaaggctactgaagaccatccaaagtctgtcaagtctggtgatgcagctatcgtcaagatggttccaaccaagccaatgtgtgtygaagctttcactgactacccaccattaggtagattcgctgtyagaga

SEQ ID NO: 424 - DNA, 1098 bp, Candida lusitaniae
  ref <308>: DATABASE ACCESSION NUMBER: ATCC 66035
ggacaagttgaaggctgagagagaaagaggtatcaccatcgatatcgctttgtggaagttcgagactccaaagtaccacgttaccgtcattgacgctccaggtcacagagatttcatcaagaacatgatcactggtacttcccaagctgactgtgctatcttgattatcgctggtggtgtcggtgagttcgaagccggtatctctaaggacggtcaaaccagagagcacgctttgttggcttacaccttgggtgtcaagcagttgattgttgctgtcaacaagatggactccgtcaagtgggaccaatctagattcgaggaaatcatcaaggaaacctctaacttcgtcaagaaggttggttacaaccctaagactgttccattcgtcccaatctctggttggaacggtgacaacatgattgagccatcyaccaactgcccatggtacaagggttgggagaaggagaccaagtcyggtaagtccaccggtaagaccttgttggaggccattgacgccattgagccaccttcgagaccaaccgacaagccattgagattgccattgcaagatgtctacaagatyggtggtattggtactgtgccagtcggtagagttgagaccggtgtcatcaaggccggtatggttgtcacctttgctccagctggtgtcaccactgaagtcaagtccgtggaaatgcaccacgaacaattggctgagggtgtcccaggtgacaacgttggtttcaacgtcaagaacgtttccgtcaaggaaatcagaagaggtaacgtctgtggtgactccaagaacgacccaccaaaggctgctgcttcyttcactgctcaagtyatygtcttgaaccacccaggtcaaatctcctcyggttactctccagtyttggactgtcacactgcycacattgcttgtaagttcgacaccttgattgagaagatcgacagaagaacyggtaagaagttggaagaagagccaaagttcatcaagtcyggtgacgctgctatcgtcaagatggtcccaaccaagccaatgtgygtygaagctttcaccgactacccaccattgggtagattcgctgtcagaga

SEQ ID NO: 425 - DNA, 1101 bp, Candida norvegensis
  ref <308>: DATABASE ACCESSION NUMBER: ATCC 22977
tcttgacaagttaaaggctgaaagagaaagaggtatcactattgatattgctttatggaaattcgaaactccaaaataccacgttaccgttattgatgctccaggtcacagagatttcattaagaacatgattactggtacttcccaagctgattgtgctatcttaattattgctggtggtgtcggtgaattcgaagctggtatctccaaggatggtcaaaccagagaacacgctttattagcattcaccttaggtgttaagcaattaattgttgctatcaacaagatggactctgttaagtgggatgaaaagagatttgaagaaattgtcaaggaaacccaaaacttcatcaagaaggttggttacaacccaaagactgttccattcgttccaatttctggttggaatggtgacaacatgattgaaccatctactaactgtccatggtacaagggttggactaaggaaaccaaggcaggtgttgttaagggtaagaccttattagaagctattgatgctattgaaccacctgtcagaccaactgacaagccattaagattaccattacaagatgtttacaagattggtggtattggtactgtgccagtcggtagagttgaaaccggtgttattaagccaggtatggttgttgttttcgcaccatctggtgttaccactgaagtcaagtccgttgaaatgcaccatgaacaattagaacaaggtgtcccaggtgacaatgttggtttcaacgtcaagaacgtctctgttaaggatattaagagaggtaacgtttgtggtgactccaagaacgacccaccacaaggttgtgcttccttcaatgctcaagtcattgtcttgaaccaccctggtcaaatttctgcaggttactctccagttttagattgtcacactgcccacattgcatgtaagttcgatgaattaatcgaaaagattgacagaagaactggtaagtccgttgaagaccatccaaagtctgttaagtctggtgatgcagctatcgttaagatggttccaaccaagccaatgtgtgttgaagctttcactgaatacccaccattaggtagattcgcagtcagaga

SEQ ID NO: 426 - DNA, 1095 bp, Candida parapsilosis
  ref <308>: DATABASE ACCESSION NUMBER: ATCC 90018
caaattgaaggctgaaagagaaagaggtatcaccattgatatcgctttgtggaaattcgaaactccaaaataccatgttactgttattgatgctccaggtcacagagatttcatcaagaatatgattactggtacttctcaagctgattgtgctattttgattattgctggtggtactggtgaattcgaagctggtatctctaaggatggtcaaaccagagaacacgctttgttggcttacaccttgggtgttaagcaattgattgttgccatcaacaagatggactcagtcaaatgggacaagaacagatacgaagaaattgtcaaggaaacttccaacttcgtcaagaaggttggttacaaccctaaagctgtcccattcgtcccaatctctggttggaacggtgacaatatgattgaaccatcaaccaactgtccatggtacaagggttgggaaaaggaaactaaagctggtaaggttaccggtaagaccttgttggaagctatcgatgctatcgaaccaccaaccagaccaactgacaagccattgagattgccattgcaagatgtctacaagattggtggtattggaactgtgccagttggtagagttgaaaccggtatcatcaaggctggtatggttgttacttttgccccagctggtgttaccactgaagtcaagtccgttgaaatgcaccacgaacaattgactgaaggtgtcccaggtgacaatgttggtttcaacgtcaagaacgtttcagttaaggaaatcagaagaggtaacgtttgtggtgactccaagaacgatccaccaaagggatgtgaytccttcaatgctcaagttattgtcttgaaccacccaggtcaaatctctgctggttactcaccagtcttggattgtcacactgcccacattgcttgtaaattcgacactttgattgaaaagattgacagaagaaccggtaagaaattggaagatgaaccaaaattcatcaagtccggtgatgctgcyatcgtcaagatggtcccaaccaagccaatgtgtgttgaagctttcactgactacccaccattgggaagattcgctgttagaga

SEQ ID NO: 427 - DNA, 752 bp, Candida rugosa
  ref <308>: DATABASE ACCESSION NUMBER: ATCC 96275
ctccgtcaagtggtctcagtctcgtttcgaggagatcgtcaaggaggtttccaacttcatcaagaaggttggttacaagcccgatgaggttcctttcgtccccatctctggctggaacggcgacaacatgcttgagccctccaccaactgcccctggtacaagggatggaccaagaagaccaagaagggtgaggtcaagggtaagactcttctcgaggccattgacgccatcgagcccccctcccgtcctaccgacaagcccctccgcttgcctcttcaggatgtctacaagatcggcggtatcggtacggtacctgtcggccgtgtcgagaccggtatcatcaagcccggcatggtcgtcactttcgcccccgctggtgtcaccactgaagtgaagtccgtcgagatgcaccacgagcagatccccgagggtctccccggtgacaacgtcggtttcaacgtcaagaacgttaccgtcaaggatatccgccgtggtaacgtctgcggtgactccaagaacgacccccccaagggctgctcttccttcactgcccaggtcatcgttttcaaccaccccggtcagatctccaacggttactcccccgttttggactgccacaccgcccacattgcctgccgcttcgacgagatccagtccaagatggaccgtcgtactggtaagacccttgaggagaaccccaagttcatcaaggctggtgactccgctatcgtcaagatggttccctccaagc

SEQ ID NO: 428 - DNA, 1093 bp, Candida sphaerica
  ref <308>: DATABASE ACCESSION NUMBER: ATCC 2504
agttaaaggctgaaagagaaagaggtatcaccatcgatatcgctttgtggaagttcgaaactccaaagtaccaagttaccgttatcgatgctccaggtcacagagatttcatcaagaacatgattactggtacttctcaagctgactgtgctatcttgattattgctggtggtgtcggtgaattcgaagccggtatctccaaggatggtcaaaccagagaacacgctttgttggctttcaccttgggtgttagacaattgattgttgctgttaacaagatggattccgttaagtgggatgaatctcgtttccaagaaattgtcaaggaaacctctaacttcatcaagaaggtcggttacaacccaaagactgttccattcgtcccaatctctggttggaacggtgacaacatgattgaagccaccaccaatgcttcatggtacaagggttgggaaaaggaaaccaagtccggtgtcgtcaagggtaagaccttgttggaagctattgacgctatcgaaccaccatccagaccaactgacaagccattgagattgccattgcaagatgtctacaagattggtggtatcggaactgtgccagtcggtagagtcgaaaccggtgttatcaagccaggtatgattgttacctttgccccagccggtgttactactgaagttaagtccgtcgaaatgcaccacgaacaattggaagaaggtctaccaggtgacaacgtcggtttcaacgtcaagaacgtttccgttaaggaaatcagaagaggtaacgtctgtggtgactccaagaacgatccaccaaaggctgctgcttctttcaacgccactgttatcgtcttgaaccatccaggtcaaatctctgctggttactctccagttttggattgtcacactgctcacattgcttgtaagttcgacgaattgttggaaaagaacgatagaagatccggtaagaagttggaagactctccaaagttcttgaagtccggtgatgctgctttggttaagttcgttccatctaagccaatgtgtgttgaagccttctctgactacccacctctaggtagattcgctgtcagaga

SEQ ID NO: 429 - DNA, 1094 bp, Candida tropicalis
  ref <308>: DATABASE ACCESSION NUMBER: ATCC 13803
aaattgaaggctgaaagagaaagaggtatcaccattgatatcgctttgtggaaattcgaaactccaaaataccacgttaccgttattgatgctccaggtcacagagatttcatcaagaacatgattactggtacttcccaagctgattgtgctattttgattattgctggtggtactggtgaattcgaagctggtatttctaaagatggtcaaaccagagaacacgctttgttggcttacaccttgggtgtcaaacaattgattgttgctgtcaacaagatggactctgttaaatgggacaaaaacagatttgaagaaattatcaaggaaacttctaacttcgtcaagaaggttggttacaaccctaaggctgttccattcgttccaatctctggttggaatggtgacaacatgattgaagcttctaccaactgtccatggtacaagggttgggaaaaagaaaccaaggctggtaaggttaccggtaagactttgttggaagccattgatgctattgaaccaccttcaagaccaactgacaagccattgagattgccattgcaagatgtttacaagattggtggtattggtactgtgccagtcggtagagttgaaactggtgtcatcaaagccggtatggttgttactttcgccccagctggtgttaccactgaagtcaaatccgtcgaaatgcaccacgaacaattggctgaaggtgtcccaggtgacaatgttggtttcaacgttaagaacgtttctgttaaagaaattagaagaggtaacgtttgtggtgactccaagaacgatccaccaaagggttgtgactctttcaacgctcaagttattgtcttgaaccacccaggtcaaatctctgctggttactctccagtcttggattgtcacactgctcatattgcttgtaaattcgacaccttggttgaaaagattgacagaagaactggtaagaaattggaagaaaatccaaaattcgtcaaatccggtgatgctgctattgtcaagatggttccaaccaaaccaatgtgtgttgaagctttcactgactacccaccattaggtagattcgctgtcagaga

SEQ ID NO: 430 - DNA, 1095 bp, Candida utilis
  strain Csp 388
caagcttaaagctgagagagagagaggtatcactatcgacattgctctctggaagttcgagactccaaagtaccacgttactgtcattgatgccccaggtcacagagatttcatcaagaacatgattactggtacctcccaggctgactgtgctattcttatcattgccggtggtgttggtgagttcgaggctggtatctctaaggatggtcagaccagagagcacgctttgctcgctttcacccttggtgttagacagatgattgttgctatcaacaagatggactctgtcaagtgggacgagaagagattcgaggagatcgttaaggagacctctaacttcatcaagaaggttggttacaacccaaagactgttccatttgtcccaatttcyggttggaacggtgacaacatgattgaggcctctaccaactgtccatggtacaagggttgggagaaggagaccaaggctggtgttgtcaagggtaagaccttgctcgatgccattgacgccattgagccaccaacaagaccaactgacaagccattgagattgccactccaggatgtctacaagattggtggtatcggaactgttccagtcggtagagtcgagaccggtgtcatcaagccaggtatggttgttacctttgccccatccggtgtcaccactgaggttaagtccgtcgagatgcaccacgagcagcttgctgagggtatcccaggtgacaacgttggtttcaacgttaagaacgtctctgttaaggagatcagaagaggtaacgttgccggtgactccaagaacgacccaccacagggtgctgagtccttcaacgctcaggtcattgtcttgaaccacccaggtcagatctctgctggttactctccagttttggactgtcacaccgcccacattgcttgtaagttctctgagcttttggagaagattgacagaagatccggtaagtcccttgaggcctctccaaagttcgtcaagtctggtgatgccgctatcgtcaagatggttccatccaagccattgtgtgttgaggccttcactgactacccaccactcggtagattcgctgtcagaga

SEQ ID NO: 431 - DNA, 1085 bp, Candida viswanathii
  ref <308>: DATABASE ACCESSION NUMBER: ATCC 28269
gctgaaagagaaagaggtatcaccatcgatatcgctttgtggaaattcgaaactccaaartaccacgttaccgtcattgaygctccaggtcacagagatttcatcaagaacatgatyactggtacttctcaagctgattgtgctatyttgattatcgctggtggtactggtgaattcgaagctggtatytctaaggatggtcaaaccagagaacacgctttgttggcctacaccttgggtgtcaagcaattgattgttgctgtcaacaagatggactctgtcaaatgggacaagaacagattcgaagaaatcatcaaggaaacctccaacttcgtcaagaaggttggttacaacccaaagactgttccattcgtcccaatctctggttggaacggtgacaacatgattgaagcctccaccaactgcccatggtacaagggttgggaaaaggaaaccaaggctggtaaggttaccggtaagactttgttggaagccattgacgctatcgaaccaccaaccagaccaactgacaagccattgagattgccattgcaagatgtctacaagattggtggtatcggaactgtgccagtcggtagagttgaaactggtgtcatcaaggccggtatggttgtcactttygccccagctggtgttaccactgaagtcaagtccgttgaaatgcaccacgaacaattggctgaaggtgtcccaggtgacaacgttggtttcaacgtcaagaacgtttccgtcaaggaaatcagaagaggtaacgtctgtggtgactccaagaacgacccaccaaagggttgtgastctttcaacgctcaagtcattgtcttgaaccacccaggtcaaatctctgctggttactctccagtcttggattgtcacactgcccacattgcttgtaagtttgacaccttggttgaaaagattgacagaagaaccggtaagaagttggaagaaaacccaaagtttgtcaagtccggtgacgctgctatcgtcaagatggtcccaaccaagccaatgtgtgttgaagcyttcactgactacccaccattgggtagattcgctgtcagaga

SEQ ID NO: 432 - DNA, 1072 bp, Candida zeylanoides
  ref <308>: DATABASE ACCESSION NUMBER: ATCC 7351
aggtattaccattgacattgccttgtggaagttcgagacccccaagtaccaggtcaccgtcattgacgctcctggccacagagatttcattaagaacatgatcactggtacctcccaggctgactgtgccatcttgatcattgctggtggtgttggtgagttcgaggctggtatctccaaggatggccagaccagagagcacgccttgcttgcctacaccttgggtgtcaagcaattgattgttgctgtcaacaagatggactccgtcaagtgggacaagaacagattcgaggagattgtcaaggagacctccaacttcgtcaagaaggttggctacaaccccaagactgtccccttcgttcccatctccggttggaacggtgacaacatgattgaggcctccaccaactgcccttggtacaagggttgggagaaggagaccaaggccggtaaggtcactggtaagaccttgttggaggctattgacgccattgagccccccaccagacccaccgacaagcccttgagattgcccttgcaggatgtctacaagattggtggtattggaacggtgcccgttggcagagttgagaccggcatcatcaaggccggtatggttgtcacctttgcccccgctggtgtcactactgaagtgaagtctgtcgagatgcaccacgagcaattggctgagggtgtcccaggtgacaatgttggtttcaacgtgaagaacgtttccgttaaggagatcagaagaggtaacgtttgcggtgactccaagaacgacccccccaaggctgctgcttctttcaacgcccaggttatcgtcttaaaccaccccggtcaaatctctgctggttactctccggttttggattgccacactgcccacattgcttgcagattcgaccagttgattgagaagatcgacagaagaaccggtaagaagatggaggacgaccctaagttcatcaagtccggtgacgctgccatcgtcaagatggttccttccaagcccatgtgtgttgaggccttcactgactaccctcccttgggtcgtttcgctgtcagagac

SEQ ID NO: 433 - DNA, 751 bp, Coccidioides immitis
  strain Silveira
agcaccaactggtccgagcctcgtttcaacgaaatcgtcaaggaagtctccaacttcatcaagaaggtcggatacaaccccaaggctgttccattcgtccccatctctggtttcgaaggtgacaacatgattcaaccctccaccaacgctccttggtacaagggctggaacaaggagaccgcctctggcaagcacactggcaagaccctcctcgacgccattgatgccatcgaccccccaacccgccccaccgagaagcccctccgtctcccacttcaggatgtgtacaagatctctggtatcggaacagtcccagtcggccgtgtcgaaaccggtgttatcaagcctggtatggttgtgaccttcgctccttccaacgtcaccactgaagtcaagtccgtcgaaatgcaccaccagcagctcacccagggtaaccctggtgacaacgttggcttcaacgtcaagaacgtctctgtcaaggaagtccgccgcggtaacgtcgctggtgactccaagaacgacccaccaaagggctgcgactccttcaacgcccaggtcatcgtcctcaaccaccctggtcaagtcggtgctggttatgccccagtccttgactgccacactgcccacattgcttgcaagttctccgagctcctcgagaagatcgaccgccgtaccggtaaatccgttgagaacaaccccaagttcatcaagtctggtgatgccgctatcgtcaagatggttccatccaagc

SEQ ID NO: 434 - DNA, 1146 bp, Cryptococcus albidus
  ref <308>: DATABASE ACCESSION NUMBER: ATCC 66030
aagctcaaggccgagcgagagcgaggtatcaccatcgacatcgccttgtggaagttcgagacccccaagtacaatgtcaccgtcattgacgcccccggtcaccgagacttcatcaagaacatgatcaccggtacctcgcaggccgactgtgccatcctcatcatcgcctccggtatcggagagttcgaggctggtatctccaaggacggtcagacccgagagcacgcccttttggccttcaccctcggtgtccgacagctcatcattgccatcaacaagatggacacctgcaaggttagttcgcaggtcctggtctctgtacgaatcttgctgaccccttttacagtggtccgaagaccgatacaacgaaatcgtcaaggaggcttccggtttcatcaagaaggtcggatacaaccccaagaccgttcccttcgtccccatctccggatggcacggagacaacatgttggaggagtccaccaacatgccctggtacaagggatggcacaaggagtccaaggccggtgttgtcaagggaaagaccttgctcgaggccatcgacgccatcgagccccctacccgaccttccgacaagcccttgcgattgcccctccaggatgtctacaagatcggtggtatcggtacggtgcccgtcggtcgagtcgagaccggtgtcatcaaggctggtatggtcgtcaccttcgcccctgccaacgtcaccaccgaagtcaagtccgtcgaaatgcaccacgaacagctcgctgagggtgttcccggtgacaacgtcggtttcaacgtcaagaacgtttccgtcaaggacatccgacgaggaaacgtctgctccgactcgaagaacgaccccgctatggagtctgcttccttcaacgctcaggtcattgtcttgaaccacccgggtcagatcggtgccggctactcccccgttttggactgccacaccgctcacattgcctgcaagttcgctgagctcgttgagaagatcgaccgacgaaccggtaaggtcatggaggccgcccccaagttcgtcaagtccggtgacgccgccatcgtcaagttgatcccgtccaagcccatgtgtgtcgagtcctactccgagtacccccccttgggtcgattcgccgtccgaga

SEQ ID NO: 435 - DNA, 1095 bp, Exophiala jeanselmei
  ref <308>: DATABASE ACCESSION NUMBER: ATCC 64755
caagctgaaggccgagcgtgagcgtggtatcaccatcgatatcgccttgtggaagttcgagactcccaagtactatgtcactgtcatcgacgcccctggtcatcgtgactttatcaagaacatgatcactggtacttcccaggctgactgcgccattctcatcattgccgccggtactggtgaattcgaagccggtatctccaaggatggtcagactcgtgagcacgctctgctcgcctacaccctgggtgtcaagcagctcattgtcgccatcaacaagatggacaccaccaagtggtccgaggatcgtttcaacgaaatcatcaaggagacttccagcttcatcaagaaggtcggctacaaccccaagtccgttcctttcgtccccatctccggcttcaacggtgacaacatgatcgatgtctccaccaactgcccctggtacaagggctgggagaaggagaccaaggctggcaaggcctctggcaagactctcctcgaggccatcgacgccatcgacccccccactcgtcccaccgacaagcctctccgtcttcctctccaggatgtctacaagatctctggtatcggaacggtgcccgtcggtcgtgttgagactggtgtcatcaaggccggtatggtcgttaccttcgctcctgccaacgtcaccactgaagtcaagtccgtcgaaatgcaccacgaacaactcgccgagggtgttccaggtgacaacgttggtttcaacgtcaagaacgtctccgtcaaggaggttcgtcgtggaaacgtctgcggtgactccaagaacgacccacccaagggtgctgattccttcaacgcccaggtcatcgtcttgaaccaccctggtcaagtcggtgctggctacgccccagtgttggattgccacactgcccacattgcttgcaagttctctgagcttctcgagaagattgaccgccgtaccggtaaatccatcgaaaacaaccccaagttcatcaagtctggtgacgctgccatcgtcaagatggttcccagcaagcccatgtgtgttgaggccttcactgactacccacctcttggtcgtttcgccgtccgtga

SEQ ID NO: 436 - DNA, 1113 bp, Fusarium oxysporum
  strain WSA-212
aagctcaaggccgagcgtgagcgtggtatcaccatcgatattgctctctggaagttcgagactcctcgctactatgtcaccgtcattggtatgttgtcgctcatgcttcattctacttctcttcgtactaacacatcactcagacgctcccggtcaccgtgatttcatcaagaacatgatcactggtacttcccaggccgattgcgccattctcatcattgccgccggtactggtgagttcgaggctggtatctccaaggatggccagacccgtgagcacgctcttcttgcctacacccttggtgtcaagaacctcatcgtcgccatcaacaagatggacaccaccaagtggtctgaggcccgttaccaggagatcatcaaggagacctcctctttcatcaagaaggtcggctacaaccccaaggctgtcgctttcgtccccatctccggtttcaacggtgacaacatgcttaccccctccaccaactgcccctggtacaagggttgggagcgtgagatcaagtccggcaagctcactggcaagaccctcctcgaggccattgactccatcgagccccccaagcgtcccgttgacaagccccttcgtcttccccttcaggatgtctacaagatcggtggtattggaacggttcccgtcggccgtatcgagactggtgtcatcaagcccggtatggtcgttaccttcgctccttccaacgtcaccactgaagtcaagtccgtcgagatgcaccacgagcaactcactgagggccagcccggtgacaacgttggtttcaacgtgaagaacgtctccgtcaaggacatccgacgtggtaacgtcgctggtgactccaagaacgacccccctatgggtgccgcttctttcaccgcccaggtcatcgtcctcaaccaccccggtcaggtcggtgctggttacgctcccgtcctcgattgtcacactgcccacattgcctgcaagttcgccgagatccaggagaagatcgaccgccgaaccggtaaggctactgaggccgcccccaagttcatcaagtctggtgactccgccatcgtcaagatggttccctccaagcccatgtgtgttgaggctttcac

SEQ ID NO: 437 - DNA, 726 bp, Geotrichum spp.
  strain LEV-4
ggtccgaggacagattcaacgagattgtcaaggagacttccaacttcatcaagaaggttggttayaaccccaagactgttgctttcgtccccatctctggttggaacggtgacaacatgattgagccctccaccaactgcccctggtacaagggatggcagaaggagaccaaggctggtgtcactaagggtaagaccctccttgaggccatcgatgccattgagccccctgtcagaccttccgacaagcccctccgtcttcccctccaggatgtctacaagatcggtggtatcggaactgtgcccgtcggccgtgtcgaaaccggtgtcatcaaggccggtatggtcgtcaccttcgcccccgctggtgtcaccactgaagtcaagtccgtcgagatgcaccacgagctcctcactgagggtctccccggtgacaacgttggtttcaacgtcaagaacgtctccgttaaggatatcagacgtggtaacgtctgcggtgactccaagaacgatccccccaaggcttgcgcttctttcaacgcccaggtcattatcttcaaccaccctggtcagatctctgctggatactctcccgtccttgattgccacaccgcccatattgcttgcaagttcgacactttgatcgagaagattgaccgtcgtactggtaagaagactgaggactcccccaagttcgtcaaggccggtgatgctgctatcgtcaaga

SEQ ID NO: 438 - DNA, 754 bp, Histoplasma capsulatum
  strain G186A5
caccaccaagtggtccgagtcccgtttcaacgaaatcatcaaggaggtttccaacttcatcaagaaggtcggatataaccccaaggctgttcccttcgtgccaatctctggtttcgagggtgacaacatgattgaaccctcccccaactgcacatggtacaagggctggaacaaggagactgcctctggcaagtcttctggtaaaacccttctcgatgccattgacgccattgaacccccaacccgtcctaccgataagcccctccgtcttcccctccaggatgtgtacaaaatctctggtattggcactgttcccgtcggacgtgttgagactggtgtcatcaagcccggtatggtcgtgactttcgctccctccaacgtcaccactgaagtcaagtccgtcgaaatgcaccaccaacaactccaggctggttaccctggcgacaacgtcggcttcaacgtcaagaacgtttcagtcaaggaagtccgccgtggcaacgttgctggcgactccaaaaatgatccccctaagggctgcgaatccttcaatgcccaggtcatcgtccttaaccaccccggccaggttggcgctggttatgccccagtcctcgactgccacactgcccacattgcttgcaagttctctgagcttattgagaagatcgaccgccgtaccggaaagtctgttgagaacaaccccaagttcatcaagtctggtgatgctgctatcgtcaagatggttccctccaagccc

SEQ ID NO: 439 - DNA, 743 bp, Issatchenkia orientalis
  ref <308>: DATABASE ACCESSION NUMBER: ATCC 6258
tgggatgaaaacagatttgaagaaattgtcaaggaaacccaaaacttcatcaagaaggttggttacaacccaaagactgttccattcgttccaatctctggttggaatggtgacaacatgattgaagcatccaccaactgtccatggtacaagggttggactaaggaaaccaaggcaggtgttgttaagggtaagaccttattagaagcaatcgatgctattgaaccacctgtcagaccaaccgaaaagccattaagattaccattacaagatgtttacaagattggtggtattggtactgtgccagtcggtagagtcgaaaccggtgtcattaagccaggtatggttgtcacttttgctccagcaggtgtcaccaccgaagtcaartccgttgaaatgcaccatgaacaattagaacaaggtgttccaggtgataacgttggtttcaacgttaagaacgtctctgtcaaggatatcaagagaggtaacgtttgtggtgactccaagaacgacccaccaatgggtgcagcttcyttcaatgctcaagtcattgtcttgaaccaccctggtcaaatttccgctggttactctccagtcttggattgtcacactgcccacattgcatgtaagttcgacgaattaatcgaaaagattgacagaagaactggtaagtctgttgaagaccatccaaagtcygtcaagtctggtgatgcagctatcgtcaagatggtcccaaccaagcc

SEQ ID NO: 440 - DNA, 1091 bp, Malassezia furfur
  ref <308>: DATABASE ACCESSION NUMBER: ATCC 42132
caagctcaaggctgagcgtgagcgtggtatcaccatcgacattgctctgtggaagttcgagacccctaagtaccacgttaccgtcattgacgctcctggtcaccgtgacttcatcaagaacatgattacgggtacctcgcaggctgactgcgctatcctcatcattgccggtggtaccggtgagttcgaggctggtatctcgaaggacggtcagacccgtgagcacgctctgctcgctttcaccctgggtgtgcgtcagctcattgtggccgtcaacaagatggacaccaccaagtactcggaggaccgcttcaacgagattgtccgcgaagtgtcgaacttcatcaagaaggtcggtttcaaccccaagactgttgccttcgtccccatctcgggctggcacggtgacaacatgatcgaggccaccaccaacatgccttggtacaagggctgggagaaggagaccaagtcgggcaaggtcactggtaagactctgctggacgccatcgacgccatcgagcccccgacccgccccactgacaagcccctgcgtctccctctgcaggatgtgtacaagatcggtggtatcggtactgtccctgtcggtcgtgttgagaccggtgtgatcaagcccggtatggttgtgaccttcgctccctcgaacgtcaccactgaagttaagtcggttgagatgcaccacgagtcgctccctgagggtctccccggtgacaacgttggtttcaacgtgaagaacgtctcggttaaggacattcgccgtggtaacgttgcctcggactcgaagaacgaccccgctcaggaggctgcttcgttcaacgcgcaggtcattgtcatgaaccaccctggtcagatcagcaacggttactcgcccgtgcttgactgccacactgcgcacattgcctgccgcttcaacaacatcctccagaagatcgaccgtcgctcgggtaaggtgcttgaggagaaccccaagttcatcaagtcgggtgacgctgccatggtggagatgatccccaccaagcccatgtgtgtggagtcgttcaacgagtacccccctctgggtcgtttcgctgtgc

SEQ ID NO: 441 - DNA, 749 bp, Malassezia pachydermatis
  ref <308>: DATABASE ACCESSION NUMBER: ATCC 42756
accaccaagtactcggaggaccgcttcaacgagattattcgcgagacttcgaacttcatcaagaaggtcggttacaacccgaagactgttgccttcgtcccgatctcgggctggcacggtgacaacatgattgaggcgaccaccaacatgccgtggtacaagggctgggagaaggagaccaagtcgggcaaggccactggtaagacccttctggacgctattgacgccattgagccgccgacgcgcccgaccgacaagcctctccgtcttcctctccaggatgtgtacaagatcggtggtatcggtacygtcccggtcggccgtgttgagaccggtgttatcaagcccggtatggttgtgaccttcgctccgtcgaacgtcacsactgaagttaagtcggtcgagatgcaccacgagcagatccctgagggtcttccgggtgacaacgttggtttcaacgtgaagaacgtgtcggtcaaggacattcgccgtggtaacgtcgcctcggactcgaagaacgacccggctcaggaggctgcctcgttcaatgctcaggtcattgtgatgaaccaccctggtcagatcagcaacggttactcgccrgtgctcgactgccacactgctcacattgcctgccgcttcaacaacatcctccagaagatcgaccgtcgttcgggtaaggttctygaagagaaccccaagttcatcaagtcgggtgacgctgccatggttgagatgatcccgaccaa

SEQ ID NO: 442 - DNA, 1150 bp, Malbranchea filamentosa
  ref <308>: DATABASE ACCESSION NUMBER: ATCC 48174
actgaaggccgagcgtgagcgtggtatcaccatcgatatcgccctctggaagttcgagacccccaagtaccatgtcaccgtcattggtacgttcgacatgttcgaccttttgcctagtgtccccttctaaccacagtttatagacgcccctggccatcgtgatttcgtcaagaacatgatcactggtacttcccaggctgattgcgctatcctcatcattgcttccggcactggtgaattcgaggctggtatctccaaggatggccagacccgtgagcacgctctgctttccttcaccctcggtgttaggcagctcattgtcgccctcaacaagatggacactgtcaacttcgctgaggcccgttacaacgagattgtcaaggaagtctccaacttcatcaagaaggtcggctacaaccccaaggccgttcctttcgtccccatctccggtttcgagggtgacaacatgatcgaggcctccacccgcattccttggtacaagggctggaacaaggagaccgccagtggcaagagcaccggcaagaccctyctcgaggccattgatgccatcgaacccccggtccgtcccaccgacaagcccctycgtctccctcttcaggatgtgtacaagatctccggtattggcactgttcctgtcggtcgtgttgagactggtgtcatcaagcctggtatggtcgttactttcgcccccgccaacgtcaccactgaagtcaagtccgtcgagatgcaccaccagcagctccaggccggtaaccccggtgacaacgtcggcttcaacgtcaagaacgtttccgtcaaggaagtccgccgtggcaacgttgcctccgactccaagaacgaccccgccaagggctgcgactccttcaacgcccaggtcatcgtccttaaccaccccggtcaggtcggtgctggatacgctcccgtcctcgattgccacactgcccacattgcttgcaagttctctgagcttcttgagaagatcgatcgccgtaccggtaaatccgttgaggaccaccccaagttcatcaagtctggtgatgccgctatcgtcaagatggttccctccaagcctatgtgcgttgaggctttcactgactaccctccccttggtcgtttcgccgtccgtgac

SEQ ID NO: 443 - DNA, 1099 bp, Metschnikowia pulcherrima
  DSM 70336
ggacaagttgaaggctgagagagagagaggtatcaccatcgacattgccttgtggaagttcgagactcctaagtaccacgtcaccgtyattgacgccccaggtcacagagatttcatcaagaacatgatcactggtacttcccaggctgactgtgcyatcttgattatcgcyggtggtgttggtgagttcgaggctggtatctccaaggatggccagaccagagagcacgctttgttggcytacaccttgggtgttagacarttgattgttgccgtcaacaagatggactctgtcaagtgggacaagaacagatttgaggagatcatcaaggagacctctaacttcgtcaagaaggttggttacaaccctaagacygtgccattcgtgccaatytctggttggaacggtgacaacatgattgaggcytccactaactgcccatggtacaagggttgggagaaggagaccaaggccggtaagtctwccggtaagaccttgttggaggccattgacgccattgagccaccaaccagacctaccgacaaggccttgagattgcctttgcaggatgtctacaagatcggtggtatcggaacggtgccagtcggccgtgtcgagaccggtgtcattaaggccggtatggttgtyaccttygccccagctggtgtcaccactgaggtcaagtccgtcgagatgcaccacgagcagttggtcgagggtcttccaggtgacaaygttggtttcaacgtcaagaacgtctccgttaaggagatcagaagaggtaacgtctgtggtgactccaagcaggacccaccaaagggtgccgcttctttcaccgcycaggttattgtgttgaaccaccctggtcagatctcctctggttactctccagtgttggactgycacaccgcccacattgcctgtaarttcgacaccttgttggagaagattgacagaagaactggtaagtccttggagtcygagcctaagttcgtcaagtcyggtgacgccgccattgtcaagatggtgccaaccaagccaatgtgtgttgaggctttcaccgactacccacctttgggtagattcgccgtcagagac

SEQ ID NO: 444 - DNA, 1153 bp, Paecilomyces lilacinus
  ref <308>: DATABASE ACCESSION NUMBER: ATCC 42570
caagctcaaggccgagcgtgagcgtggtatcaccatcgacattgccctctggaagttcgagactcccaagtactatgtcaccgtcattggtacgtcgactcgcgcgagactggtcgcaatttccacgtcgctaacgtgcttgaacagacgctcccggccaccgtgacttcatcaagaacatgatcactggtacctcccaggctgactgcgctatcctcattatcgctgccggcactggtgagttcgaggctggtatctccaaggatggccagacccgtgagcacgctctgctcgcctacaccctcggtgttaagcagctcatcgtcgctatcaacaagatggacaccaccaagtggtctgaggcccgtttccaggagatcatcaaggagacctccaacttcatcaagaaggtcggctacaaccccaagaccgtcgctttcgtccccatctctggtttccacggcgacaacatgctttccccctccaccaactgcccctggtacaagggctgggagaaggagaccaaggctggcaagtccaccggcaagaccctccttgaggccatcgactccatcgagccccccaagcgccccagcgacaagcccctccgccttccccttcaggatgtgtacaagatcggcggtatcggcacagtccctgtcggccgtatcgagactggtgtcatcaagcccggcatggtcgtgaccttcgctccttccaacgtcaccaccgaagtcaagtccgttgagatgcaccacgagcagctctccgagggtgtccccggtgacaacgtcggcttcaacgtcaagaacgtctccgtcaaggagatccgtcgtggcaacgtcgccggtgactccaagaacgacccccctctgggtgccgcttctttcgatgcccaggtcatcgtcctcaaccaccccggccaggtcggtgctggctacgcccccgtcctcgactgccacaccgcccacattgcctgcaagttcgccgagatcaaggagaagatcgaccgccgtaccggcaagtctgtcgagtccgcccccaagttcatcaagtctggcgactctgccatcgtcaagatgattccctccaagcccatgtgcgttgaggctttcaccgactaccctcctctgggccgcttcgccgtccgtga

SEQ ID NO: 445 - DNA, 763 bp, Paracoccidioides brasiliensis
  ref <308>: DATABASE ACCESSION NUMBER: ATCC 32071
taccactaagtggtccgagacccgattcaatgaaattatcaaggaagtcaccaatttcattaagaaggtcggatataaccccaagactgttcctttcgttcccatttctggtttcgagggtgacaacatgatcgagccctctgccaactgcccatggtacaagggctggtccaaggagactgctcagggcaagtactctggcaagacccttcttgaggccatcgacgccattgagccccccacccgtcctaccgataaacctctccgtcttcccctccaggatgtctacaagatctccggtattggcactgttcctgtcggacgtgttgagactggagtcatcaagcccggtatggtcgtgaccttcgctcccgccaacgtcaccactgaagtcaagtccgtcgaaatgcaccaccagcagcttaccgccggtaaccccggtgacaacgtcggcttcaacgtcaagaatgtttccgtcaaagaagtccgccgtggtaacgttgccggtgactctaagaatgatcccccaaagggctgcgattccttcaatgcccaggtcatcgtcctcaaccaccctggtcaggttggcgctggttatgccccagtcctcgactgccatactgcccacattgcctgcaaattcgctgagctccttgagaagattgatcgacgaaccggaaagtctgttgagaacaaccccaagttcatcaagtccggtgatgctgctatcgtcaagatgattccttccaagcccatgtgcgtc

SEQ ID NO: 446 - DNA, 1346 bp, Penicillium marneffei
  ref <308>: DATABASE ACCESSION NUMBER: ATCC 64101
aagctcaaggctgagcgtgagcgtggtatcaccatcgatattgctctctggaagttccagactgccaagtacgaggttaccgtcattgacgcccccggtcaccgtgatttcatcaagaacatgatcactggtacctcccaggccgattgcgctattctcatcattgcctctggtactggtgaattcgaggctggtatctccaaggatggccagactcgtgagcacgctcttttggctttcaccctcggtgtccgtcagctcattgttgccctcaacaagatggacacttgcaagtggtctcagggtgagtactcgtacctgcgtttggccttgaatatcttactaatgcaccatagatcgttacaacgaaattgtcaaggagacttccaacttcatcaagaaggtcggatacaaccccaagaacgttcctttcgttcctatctccggtttcaacggtgacaacatgcttgagccctcccccaactgcccctggtacaagggttgggagaaggagaccaaggccggtaaggtcactggtaagaccctcctcgaggccatcgacgccattgagccccctacccgtcccgccaacaaggttagtccctcctcgactactcaaaccctcctcataagttcagattactgactcgttcacagcccctccgtcttcccctccagratgtctacaagatcggtggtattggaacggttcccgtcggtcgtgttgagactggtaccatcgttcctggtatggttgtcaccttgtaagtcactctcctcgcttatcctacctgaaatcatcatgtgctaacttgacactcagcgctcccgccaacgtcaccactgaagtcaagagtgttgaaatgcaccaccagcagctcactgccggtcagcccggtgacaacgttggtttcaacgtgaagaacgtctccgtcaaggaaatccgtcgtggtaacgttgctggtgacagcaagaacgacccccctgccggtgctgcctccttcaacgcccaggtcatcgtcctcaaccaccccggtcaggtcggtgctggttacgccccagtcctcgattgccacactgcccacattgcttgcaagttcgctgagctcctcgagaagattgaccgtcgtaccggaaagtctgttgaggaccaccccaagttcatcaagtccggtgacgctgccatcgtcaagatgattccttccaagcccatgtgtgttgaggctttcaccgagtaccctcctctcggtcgtttcgccgttcgcgagtaagttttatctccgttgtctattttccatccttcccttctcctccgtcttccatatatactttttcagttatatgtg

SEQ ID NO: 447 - DNA, 1094 bp, Pichia anomala
  misc_feature (1)...(1094): n=a,t,c or g
  ref <308>: DATABASE ACCESSION NUMBER: ATCC 18205
aagttaaaagctgaacgtgaaagaggtatcactattgatattgctttatggaaattcgaaactccaaaataccatgttaccgttattgatgctccaggtcacagagatttcatcaaaaatatgattactggtacttcccaagctgattgtgctatyttaattattgccggtggtattggtgaattcgaagctggtatctcaaaagatggtcaaaccagagaacacgctttnttagcttacaccttaggtgttaaacaattgattgttgctatcaacaagatggattccgttaaatgggatgaatctcgtttcgaagaaattgtcaaggaaacytcaaactttatcaagaaagttggttacaacccaaaaactgttccattcgttccaatctcaggttggaatggtgataacatgattgaaccatcawctaactgtccatggtacaaaggttggaaaaaagaaaccaaagctggtgaagctaaaggtaaaactttattagaagccattgatgctattgacccaccatcaagaccaactgataaaccattacgtttaccattacaagatgtttacaarattggtggtattggtactgtgccagtcggtagagttgaaaccggtgttatcaaaccaggtatggttgttacctttgccccagctggtgttaccactgaagtcaaatctgttgaaatgcatcatgaacaattgactgaaggtttaccaggtgacaatgttggtttcaacgttaagaatgtttctgttaaagaaatccgtcgtggtaacgtctgtggtgactctaaaaacgatccaccaaaagctgctgaatcattcaatgctcaagttattgtcttaaaccatccaggtcaaatctctgctggttactctccagttttagattgtcacactgctcacattgcttgtaaatttgacactttaattgaaaaaattgacagacgtactggtaagaaattagaagaagctccaaaattcatcaaatcaggtgatgctgctattgttaaatttgttccatcaaaaccattatcagttgaagctttcactgactacccaccattaggtcgtttcgctgtcagaga

SEQ ID NO: 448 - DNA, 1100 bp, Pichia anomala
  ref <308>: DATABASE ACCESSION NUMBER: ATCC 2149
cttagataagttaaaagctgaacgtgaaagaggtatcactattgatattgctttatggaaattcgaaactccaaaataccatgttaccgttattgatgctccaggtcacagagatttcatcaaaaatatgattactggtacttcccaagctgattgtgctatmttaattattgccggtggtattggtgaattcgaagctggtatctcaaaagatggtcaaaccagagaacacgctttrttagcttacaccttaggtgttaaacaattgattgttgctatcaacaagatggattccgttaaatgggatgaatctcgtttcgaagaaattgtcaaggaaacytcaaactttatcaagaaagttggtacaacccaaaaactgttccattcgttccaatctcaggttggaatggtgataacatgattgaaccatcaactaactgtccatggtacaaaggttggaaaaaagaaaccaaagctggtgaagctaaaggtaaaactttattagaagccattgatgctattgatccaccatcaagaccaactgataaaccattacgtttaccattacaagatgtttacaarattggtggtattggtactgtgccagtcggtagagttgaaaccggtgttatcaaaccaggtatggttgttacctttgccccagctggtgttaccactgaagtcaaatctgttgaaatgcatcatgaacaattgactgaaggtttaccaggtgacaatgttggtttcaacgttaagaatgtttctgttaaagaaatccgtcgtggtaacgtctgtggtgactctaaaaacgatccaccaaaagctgctgaatcattcaatgctcaagttattgtcttaaaccatccaggtcaaatctctgctggttactctccagttttagattgtcacactgctcacattgcttgtaaatttgacactttaattgaaaaaattgacagacgtactggtaagaaattagaagaagctccaaaattcatcaaatcaggtgatgctgctattgttaaatttgttccatcaaaaccattatcagttgaagctttcactgactacccaccattaggtcgtttcgctgtcagaga

SEQ ID NO: 449 - DNA, 1201 bp, Pseudallescheria boydii
  ref <308>: DATABASE ACCESSION NUMBER: ATCC 44331
caagctcaaggccgagcgtgagcgtggtatcaccatcgatatcgccctctggaagttcgagacccccaagtaccaggtcaccgtcattggtatgtctttgtgctttttgtgctttttgtgcctgtgcctcgcacaattccagccctcgataattatgaacctcgtactaatatgtcgttctcccactacccacagacgcccccggccatcgtgatttcatcaagaacatgattactggtacctcccaggctgattgcgccattctcatcattgcctccggtactggtgagttcgaggctggcatctccaaggatggccagacccgtgagcacgctcttctcgccttcaccctcggtgtcaagaacctcattgttgccatcaacaagatggacaccaacaactggtccgaggaccgatacaaggagatcatcaaggagacctccaacttcatcaagaaggtcggctacaaccccaaggccgttcctttcgtccccatctccggtttccacggagacaacatgcttaccccctccaccaactgcccctggtacaagggttgggtccgtgaggtcaagggtaacacccttaccggcaagacccttctcgaggccatcgactycatcgagccccccaagcgtcccaccgagaagcccctccgtcttccccttcaggacgtctacaagatcggtggtattggcactgtgcccgtcggccgtatcgagaccggtatcctcaagcccggtatggtcgtcaccttcgctccctccaacgtcaccactgaagtcaagtccgtcgagatgcaccacgagcagcttaccgagggtgtccccggtgacaacgttggtttcaacgtgaagaacgtctccgtcaaggatatccgccgtggcaacgtctgcggtgactccaagaacgacccccccgctgctgccgcctctttccaggcccaggtcattgtcctcaaccaccccggccagatcggtgctggttacgctcccgttcttgactgccacactgcccacattgcttgcaagttcgccgagctccttgagaagatcgaccgccgtaccggtaagtcggtcgagaacaaccccaagttcgtcaagtctggtgatgccgccatcgtcaagatggttccctccaagcccatgtgtgttgagtccttcaccgagtacccccctctcggtcgtttcgccgtccgtga

SEQ ID NO: 450 - DNA, 1095 bp, Rhizopus oryzae
  ref <308>: DATABASE ACCESSION NUMBER: ATCC 56015
caagcttaaggctgaacgtgaacgtggtatcaccatcgatattgctctctggaagttcgaaacccccaagtaccaaattaccgttattgatgctcccggtcaccgtgatttcatcaagaacatgattaccggtacttctcaagccgattgtgctattcttatcattgctggtggtactggtgaattcgaagctggtatctccaaggatggtcaaacccgtgaacacgcccttttggctttcactctcggtgtccgtcaattgattgttgctgtcaacaagatggataccaccaagtggtccgaagctcgtttcaacgaaatygtcaaggaagtttcttccttcatcaagaagattggttacaaccccaagtctgttcccttcgtccccatctctggttggcacggtgacaacatgttggaagaatctaccaacatgccctggtacaagggatggaacaaggaaaccaaggctggtgccaagtctggtaagaccctcttggatgccattgacaacattgaccctcctacccgtcctgttgacaagcctctccgtcttcctcttcaagatgtttacaagattggtggtatcggtactgtccccgtcggtcgtgtcgaaactggtgtcatcaaggctggtatggttgtcaccttcgctcctgctgctgtcaccactgaagttaagtccgtcgaaatgcaccacgaaaccctcactgaaggtctccccggtgacaacgtcggtttcaacgtcaagaacgtctccgtcaaggatatccgtcgtggtaacgtctgttctgactccaagaacgaccccgccaaggaagccggttccttcaccgctcaagtcattatcttgaaccaccctggtcaaattggtgctggttacgctccygttttggattgtcacactgctcacattgcctgtaagttcgctgaattgatcgaaaagattgacagacgttccggtaagtccttggaagctactcccaagttcgtcaagtctggtgactctgccatcgtcaagatgatcccctccaagcccatgtgtgttgaagcttacactgactaccctcctctcggtcgtttcgctgttcgtga

SEQ ID NO: 451 - DNA, 1292 bp, Rhodotorula minuta
  ref <308>: DATABASE ACCESSION NUMBER: ATCC 10658
gctgaaggccgagcgagagcgtggtatcaccatcgatatcgctctatggaagttcgagacccccaagtacaacgtcaccgtcattgacgctccaggacatcgtgatttcatcaagagtgagttaaccataacatcaaacagtgttgcaaacatcagctaatgcatgttatgcgtccagacatgattactggtacttcccaggccgattgcgctattctcatcatcgccaccggtgttggtgagttcgaggctggtatctccaaggatggccagacccgagagcacgcccttctcgccttcaccctcggtgtcagacagctcatcgttgccttgaacaagatggactcggtcaaggtaggctaacttcacaacgtcggcttcccatcattcattcacttacctgtcttgtcttccaccctccagttctccgagtcccgatacgatgaaatcgtcaaggagacatccggtttcatcaagaaggtcggattcgaccccaagggtgttcccttcgtccccatctcaggatggcacggagacaacatgatcgaggagtccaccaacatgccttggtacaagggatggaagaagaccaccaagaccggcgagtacaagggaaagaccctgctcgaggccatcgactccatcgagccccccacccgtcctaccgacaagcctctccgacttcccctccaggatgtctacaagattggtggtatcggaacagtgccagtcggacgagtcgagactggtaccatcaaggctggtatggtcgtcaccttcgctccttcagctgtcaccaccgaagtcaagtctgttgagatgcaccacgagcagctcgaggctggtcttccaggtgacaacgtcggattcaacatcaagaacgtttcagtcaaggatatccgaagaggaaacgtctgcggtgactccaagaacgatccccccaaggaggctgcttccttcaccgcccaggtcattgtcctcaaccaccccggtcaaatcggtaacggatactctccagttctcgattgccacactggtgagtcattcttccatattagtttgaactcttttgaacaatactaacgtgaatcattatacttttcagcccacattgcatgcaagttcgacaccctcctagagaagattgaccgacgatccggaaagtccatcgaagatacccccaagttcgtcaagtctggtgacgccgccatcgtcaagatggtccccaccaagccaatgtgcgttgaggctttcaccgactacccacctcttggacgattcgccgtccgtga

SEQ ID NO: 452 - DNA, 1289 bp, Sporobolomyces salmonicolor
  ref <308>: DATABASE ACCESSION NUMBER: ATCC 32311
aagctcaaggccgagcgtgagcgtggtatcaccatcgatatcgctctctggaagttcgagacccccaaggtgcgttctcaccccggctgaggagcacgcacgcgagggctcacgctgcgcctcttacagtacatgatcaccgtcatcgacgccccgggtcaccgtgacttcatcaagaacatgatcaccggtacctcgcaggccgactgcgccatcctcatcatcgccgccggtaccggtgagttcgaggctggtatctcgaaggacggccagacccgcgagcacgccctcctcgccttcaccctcggtgtccgtcagctcatcgtcgccatcaacaagatggacacgaccaagtactcggaggcccgtttcgaggagatcatcaaggagacctccaacttcatcaagaaggtcggcttcaaccccaagaacgtccccttcgtccccatctcgggatggcacggtgacaacatgattgaggagaccgccaacatgccctggtacaagggatggaagaaggagaccaaggccggtgaggtcaagggcaagaccctcctcgacgccatcgacgcgatcgagcccccttcgcgccctaccgacaagcccctccgtcttcccctccaggttcgtttccctgctcgcggtttacgctgctacttcgagctgacccgcgagctctgcccgaacaggatgtctacaagatcggtggtatcggcacagtccccgtcggccgtgtcgagaccggcacgatcaaggccggtatggtcgtcgtcttcgccccggccaacgtcaccactgaggtcaagtcggtcgagatgcaccacgagcagctcgaggctggtctcccgggagacaacgtcggcttcaagtgcgtctcatcatgtttttgcttcgctcggccattttttcagtcctgaccccgttttgcccctcgacagcgtcaagaacgtttccgttaaggacatccgtcgcggtaacgtctgcggtgactcgaagaacgacccccccaaggaggccgcttccttcaaggcccaggtcatcgtcatgaaccaccccggtcagatcggcaacggttacgctcccgttctcgactgccacaccgcccacattgcctgcaagttcgacaccctcctcgagaagatcgaccgtcgctcgggcaagtcgattgaggacctccccaagttcgtcaagtcgggtgacgccgccatcgtcaagatggttccctccaagccgatgtgtgtcgagtcgttcgccgagtacccccctctcggacgtttcgccgtccgtga

SEQ ID NO: 453 - DNA, 1070 bp, Sporothrix schenckii
  strain WSA-148
gtgagcgcggtatcaccatcgatattgctctgtggaagttcgagacccccaagtactacgtcaccgtcattgacgcccccggtcatcgcgatttcatcaagaacatgatcactggtacctcgcaggccgactgcgccattctcatcattgccgctggtactggtgagttcgaggctggtatctccaaggatggccagactcgtgagcacgctctgctcgcctacaccctgggtgtgcggcagctgatcgtcgccatcaacaagatggacacggccaagtgggctgaggctcgttaccaggagatcatcaaggagacctccaacttcatcaagaaggtcggctacaaccccaagactgttgccttcgtccccatctcgggcttccacggcgacaacatgcttactccctcgaccaactgcccctggtacaagggctgggagaaggagggcaagagcggcaaggttaccggtaagactctgctggacgccattgacgccgtcgagccccccaagcgccccacggacaagcccctgcgtctgcccctccaggatgtctacaagatcggcggtatcggcactgtccctgtcggccgtatcgagactggtgtcctgaagcccggcatggtcgtcacctttgccccgtccaacgtcaccactgaagtcaagtccgtcgagatgcaccacgagcagcttgttgagggtgttcccggcgacaacgtcggcttcaacgtcaagaacgtctccgtcaaggagatccgtcgtggcaacgttgccggtgactccaagaacgaccccccctcgggcgccgccaccttcaacgcccaggtcattgtcctgaaccaccccggccaggtcggcaacggctacgccccggttctggactgccacaccgcccacattgcctgcaagttcaccgagatccttgagaagatcgaccgccgtaccggcaagtcggttgagaacaaccccaagttcatcaagtcgggtgacgccgccattgtcaagctgacgccctcgaagcccatgtgcgttgaggccttcactgactacccccctctgggccgtttcgcc

SEQ ID NO: 454 - DNA, 1092 bp, Stephanoascus ciferrii
  ref <308>: DATABASE ACCESSION NUMBER: ATCC 52550
cttaagtctgagcgtgagagaggtatcaccatcgatattgctctctggaaattcgagactcctaagtacaacgttaccgtcattgatgctccaggtcacagagatttcatcaagaacatgattactggtacctcccaggccgatcttgccatccttatcattgctggtggtgtcggtgagttcgaggctggtatctccaaggacggtcagaccagagagcacgctcttctttctttcacccttggtgtcagaaacatgattgttgctgtcaacaagatggactccgtcaagtggtctgaggatcgtttcaacgaaattgtcaaggagacctccaacttcgtcaagaaggttggttacaaccctaagaatattgctttcgttcctatctccggttggaacggtgacaatatgattgagccatccaccaactgcccatggtacaagggttgggagcgtgagaccaagaacggtactgccaagggtaagaccatcttggaggccattgactctatggagccaccttccagaccagttgacaagcctctccgtcttcctcttcaggacgtttacaagattggtggtattggtacggtgccagttggtcgtgttgagactggtgttatcaagccaggtatggttgttacctttgccccagctggtgtcaccactgaagtcaagtctgtcgagatgcaccacgaacagatcccagaaggtaccccaggtgacaacgttggtttcaacgtcaagaacgtctccgtcaaggaaatcagacgtggtaacgttactggtgactccaagaacgacccaccaaagggctgcgactctttcaacgctcaggtcatcatcttcaaccaccctggtcagatctctgctggttacgctccagttttggactgccacactgctcacattgcttgcaagtttgaggagctcattgagaagattgacagacgttccggtaagaaggtcgaagactctcctaagttcgtcaaggccggtgatgccgccattgtcaagatggttccatccaagccaatgtgtgttgaaaccttcactgagtacccacctcttggtcgtttcgccgtccgtgac

SEQ ID NO: 455 - DNA, 1149 bp, Trichophyton mentagrophytes
  strain WSA-225
gccgagcgtgagcgtggtatcaccatcgatatcgccctctggaagttcgagacccccaagtacaatgtcaccgtcattggtatgttttctctttacctttcccctccatcgtcttgctgtgccataactaacgagagtagacgcccccggtcaccgtgacttcatcaagaacatgatcactggtacctcccaggccgactgtgctattctcatcattgctgccggtactggtgagttcgaggctggtatctccaaggatggccagacccgtgagcacgctctgctcgccttcacccttggtgtcaagcagctcatcgttgccatcaacaagatggacaccaccaactggtccgaggaccgtttcaaggaaatcatcaaggaagtcaccaacttcatcaagaaggttggctacgaccccaagggtgttccattcgttccaatctctggtttcaacggtgacaacatgattgaggcctccaccaactgcccatggtacaagggatggaacaaggagactaaggccggtggtgccaagactggcaagaccctcctcgaggccatcgatgccatcgacatgccaacccgtcctaccgacaagcccctccgtctcccactccaggatgtctacaagatctctggtatcggaactgtaccagtcggtcgtgttgagaccggtatcatcaagcccggtatggtcgtcaccttcgcccctgccaacgtcaccactgaagtcaagtccgtcgaaatgcaccaccagcagcttcagcagggtgtccccggtgacaacgtcggcttcaacgtcaagaacgtttccgtcaaggaagtccgccgtggtaacgttgccggtgactccaagaacgacccaccatccggctgtgcctccttcaacgcccaggtcatcgtcctcaaccaccccggccagatcggtgctggttacgccccagtcctcgactgccacactgctcacattgcttgcaagttcgctgagctcctcgagaagattgaccgccgtaccggtaaatccgtcgaagccaaccccaagttcgtcaagtctggtgatgccgctatcgccaagatggttccctccaagcctatgtgcgttgaggctttcactgactaccccccacttggtcgtttcgccgtccgtga

SEQ ID NO: 456 - DNA, 1101 bp, Trichosporon cutaneum
  ref <308>: DATABASE ACCESSION NUMBER: ATCC 62965
tcttgacaagcttaaagctgaacgtgaacgtggtatcaccattgatatcgctctctggaagttcgaaactcctaagtactacgttactgttattgatgctccaggtcaccgtgatttcatcaagaacatgattactggtacttcccaagccgactgcgccattcttatcattgctgccggtgtcggtgaattcgaagctggtatctccaaggaaggtcaaaccagagaacacgctcttctcgctttcacccttggtgtcagacaacttatcattgccatcaacaagatggactctgtcaagtgggaccaaaagagatacgaagaaatcgtcaaggaggcttccaacttcgtcaagaaggttggttacaaccccaagtctgttccattcgttcctatctctggttggaacggtgacaacatgttggaacctaccaccaacgccccatggtacaagggatggaccaaggaaaccaaggctggtgccactaagggtatgactcttattgaagccattgacgccattgaaccaccagtaagaccatccgacaagccactccgtctcccactccaagatgtttacaagattggtggtatcggaactgtgccagtcggccgtgtcgaaaccggtatcatcaaggccggtatggtcgtcacctttgctccaccaatggtcacaactgaagttaagtccgttgaaatgcaccacgaacaacttgctcaaggtaacccaggtgacaacgttggtttcaacgtcaagaacgtttccgttaaggaaatcagacgtggtaacgtctgtggtgactccaagaacgatccaccaaagggctgcgaatctttcaacgctcaagttatcgtcttgaaccaccctggtcaaatctctgctggttactctccagttctcgattgccacactgcccacattgcctgcagattcgacgaactccttgaaaagatcgaccgtcgttccggtaagaagattgaagactctccaaagtttgtcaagtctggtgatgccgctatcgtcaagatgatcccaaccaagccaatgtgcgttgaaaccttcactgaatacccaccacttggtcgtttcgccgtccgtga

SEQ ID NO: 457 - DNA, 1085 bp, Wangiella dermatitidis
  strain WSA-229
gttgaaggccgagcgtgagcgtggtatcaccatcgatatcgccctctggaagttcgagacccccaagtactatgtcaccgtcatcgacgccccgggtcatcgtgactttatcaagaacatgatcactggtacctcgcaggccgactgcgccatcttgatcattgccgccggtaccggtgaattcgaagccggtatctccaaggatggtcagacccgtgagcacgctctgctcgcctacaccttgggtgtcaagcagctcatcgtcgccatcaacaagatggacaccaccaagtggtccgaggagcgtttcaacgaaatcatcaaggagacttccaacttcatcaagaaggtcggctacaaccccaaggccgttcctttcgtccccatctccggcttcaacggtgacaacatgattgaggtctccaccaactgcccgtggtacaagggatgggagaaggagtccaaggctggcaaggccaccggcaagaccctcctcgaggccattgacgccatcgacccacccacccgtcccaccgacaagcctctccgtctccctctccaggatgtctacaagatctctggtatcggaacggttcctgtcggtcgtgtcgagaccggtaccatcaaggccggtatggtcgtcaccttcgctccggccaacgtcaccactgaagtcaagtccgtcgaaatgcaccacgagcagctcgccgagggtctgccaggtgacaacgttggcttcaacgtcaagaacgtctccgtcaaggaggttcgtcgtggtaacgttgccggtgactccaagaacgacccgcccaagggtgccgagtccttcaacgcccaggtcattgtcctcaaccaccctggtcagatcggtgccggctacgctccagtcttggattgccacactgcccacattgcttgcaagttcgccgagttgctcgagaagatcgaccgtcgtaccggaaagtccatcgagaacaaccccaagttcatcaagtctggtgatgctgccatcgtcaagatgattcccagcaagcccatgtgtgtcgaggctttcaccgactatcctcctctgggtcgtttcgctg

SEQ ID NO: 458 - DNA, 492 bp, Aspergillus fumigatus
  strain DAL-95
tgtcttcatccggaattgattgtgagtcgttccacatgctcacctagttttcgctcgatcttttcactaacgcaaaccatgtagaacaacattgccaaggcccacggtggttactccgtcttcactggtgttggtgagcgtactcgtgagggtaacgatctgtaccacgaaatgcaggagactggtgtcattcagctcgagggtgaatccaaggtcgcactggtgttcggacagatgaacgagccccccggtgcccgtgcccgtgtcgcccttaccggtctgaccattgccgagtacttccgtgacgaggagggtcaggacgtgctgctcttcattgacaacattttccgtttcacccaggccggttctgaggtgtctgcccttctcggtcgtatcccctctgccgtcggttaccagcccaccctggccgtcgacatgggtggtatgcaggagcgtatcaccaccaccaagaagggttctattacctccgtc

SEQ ID NO: 459 - DNA, 1154 bp, Blastoschizomyces capitatus
  ref <308>: DATABASE ACCESSION NUMBER: ATCC 10663
gtccgtggtcaagaagttattgacactggtgccccaattaccattcctgttggtcgtggtactcttggtagaattatcaacgtcattggtgaaccaattgacgaacgtggtcctatcaaggcttctaagtatgctcctatccatactgaaccaccaacctttgctgaacaatctacttctgctgaagttcttgaaactggtatcaaggttgtcgatcttcttgctccttacgcccgtggtggtaagattggtcttttcggtggtgctggtgtcggtaagactgtcttcattcaagaacttattaacaacattgccaaggctcacggtggtttctctgtcttcactggtgtcggtgaaagaacccgtgaaggtaacgatctttaccgtgaaatgaaggaaactggtgtcatcaacctcgaaggtgactccaaggtcgctctcgttttcggtcaaatgaacgaacctccaggtgcccgtgcccgtgtcgctttgactggtcttaccattgccgaatacttccgtgatgaagaaggacaagatgtcttgcttttcgttgacaacattttcagattcacccaagccggttctgaagtctctgctcttttgggtcgtattccatctgccgtcggttaccaacctacccttgctaccgatatgggtgccctccaagaacgtattaccaccacccaaaagggttccgtcacatctgtccaagccgtctatgtcccagcagacgatttgactgatcctgccccagccaccactttcgctcacttggacgccaccactgtcttgtctcgttccatttccgaattgggtatctacccagctgtcgatcctctcgattccaagtctcgtcttttggatcctgaagttattggacacgaacactacgaagttgccactcaagttcaacaaaccctccaagcttacaagtctctccaagatatcattgccattttgggtatggatgaattgtctgaagctgataagcttactgtcgaacgtgcccgtaagatccaaagattcctttcccaaccattcgctgttgccgaagttttcactggtatcgaaggtcgtctcgttccattgaaggaaaccgtcagatctttcaaggaaatccttgaaggtaagtacgatcaccttccagaagc

SEQ ID NO: 460 - DNA, 1295 bp, Candida albicans
  ref <308>: DATABASE ACCESSION NUMBER: ATCC 18804
ccaattcgacgaaggaaacttgccagctattttgaatgctttgactttgaagaacggtgaccaagacttggtcttggaagttgctcaacatttgggtgaaaacaccgtcagagctattgctatggatggtactgaaggtttagtcagaggtaccgaagtcaacgataccggtgccccaatctccgtcccagtcggtagaggtactttaggtagaatcatcaatgttgttggtgaaccaattgatgacagaggtccaattgaatgtaaggaaaagaaaccaattcacgctgaaccaccatcattcgttgaacaatccactgctgccgarattttggaaaccggtatcaaggttgtcgacttgttggccccatacgccagaggtggtaarattggtttattcggtggtgctggtgtcggtaagaccgtctttatccaagaattgattaacaacattgccaaagcccatggtggtttctctgtctttaccggtgtyggtgaaagaaccagagaaggtaacgatttgtaccgtgaaatgaaagaaaccggtgtcatcaacttggaaggtgactccaaggtcgctttggtcttcggtcaaatgaacgaaccaccaggtgctagagctagagttgctttgactggtttgaccattgctgaatacttcagagatgaagaaggtcaagatgtcttgttgttcattgataacattttcagattcacccaagctggttccgaagtgtctgctttgttaggtcgtattccatctgctgtcggttatcaaccaaccttagccactgatatgggtcttttgcaagaacgtattaccaccaccaagaaaggttccgtcacctctgtccaagctgtctatgtcccagctgatgatttgaccgatcctgctccagccactacattcgcccatttggatgccactactgtcttgtctagaggtatttctgaattgggtatctacccagctgtcgatccattggattccaaatccagattattggacgcttctgttgttggtcaagaacattacgatgtcgctactggtgttcaacaaactttacaagcttacaaatccttacaagatatcattgctattttgggtatggatgaattgtctgaagctgataaattgactgtcgaaagagcccgtaagatccaaagattcttgtctcaaccattcgctgttgctgaagttttcactggtatcccaggtagattagtcagattgcaagacactgtcaaatcattcaaggatgttttggaaggtaaatacgataacttgccagaaa

SEQ ID NO: 461 - DNA, 1277 bp, Candida dubliniensis
  strain NCPF 3949
taacttgccagctattttgaatgctttgactttgaagaacggtgaccaagatttagttttggaagttgctcaacatttgggtgaaaacaccgtcagagctattgctatggatggtactgaaggtttagtcagaggtactgaagtcaacgataccggtgccccaatctccgttccagtcggtagaggtaccttaggtagaatcatcaatgttgttggtgaaccaattgatgacagaggtccaattgaatgtaaggaaaagaaaccaattcatgcagaaccaccatccttcgttgagcaatccactgctgccgaaattttggaaaccggtatcaaggttgtcgacttattggccccatacgccagaggtggtaagattggtttgttcggtggtgctggtgtcggtaagaccgtctttatccaagaattgattaacaacattgctaaagcccatggtggtttctccgtctttaccggtgtcggtgaaagaaccagagaaggtaacgatttgtaccgtgaaatgaaagaaaccggtgtcatcaacttagaaggtgactccaaggtcgctttggtctttggacaaatgaacgaaccaccaggtgctagagctagagttgctttgactggtttgactattgctgaatacttcagagatgaagaaggtcaagatgtcttgttgttcatcgataacattttcagattcacccaagctggttccgaagtgtctgctttgttaggtcgtattccatctgccgtcggttatcaaccaaccttagctactgatatgggtcttttgcaagaacgtattaccaccaccaagaaaggttccgtcacctctgtccaagctgtctatgtcccagctgatgatttgaccgatcctgctccagccaccacattcgcccatttggatgccactactgtcttgtctagaggtatttctgaattgggtatttacccagctgtcgatccattggattccaaatccagattattggacgctgccgttgttggtcaagaacattatgatgtcgctactggtgttcaacaaactttgcaagcttacaaatccttacaagatatcattgctattttgggtatggatgaattgtctgaagctgataaattgactgtcgaaagagcccgtaagattcaaagattcttgtctcaaccattcgccgttgctgaagttttcactggtattccaggtagattagtcagattgcaagacactgtcaaatcattcaaggatgttttggaaggtaaatacgatcacttgccag

SEQ ID NO: 462 - DNA, 1278 bp, Candida famata
  ref <308>: DATABASE ACCESSION NUMBER: ATCC 62894
gtaacttgccagctattttgaacgctttgaccttgaagaacggtgaaaacgacttagttttagaagttgcccaacatttgggtgaaaacaccgtcagagctattgctatggatggtactgaaggtttagttagaggtactccagttaccgattctggtgctccaatttctgtcccagtcggtagaggtactttaggtagaatcttgaacgttattggtgaaccaattgatgaacaaggtccagttgatgccaaggaaaccagaccaattcaccaagacccaccagcattcgttgatcaatccaccaaggctgaagttttggaaactggtatcaaggttgtcgatttattagccccttacgctagaggtggtaagattggtttattcggtggtgccggtgtcggtaagaccgtctttatccaagaattgattaacaacattgccaaggcccatggtggtttctctgttttcactggtgtcggtgaaagaaccagagaaggtaacgatttatatagagaaatgaaggaaactggtgtcattaacttggaaggtgactccaaggtcgccttggttttcggtcaaatgaacgaaccaccaggtgctagagctagagttgctttaaccggtttaaccattgccgaatacttcagagacgaagaaggtcaagatgtgttattgttcgtcgataacatttttagattcacccaagccggttccgaagtgtctgctttgttaggtcgtattccatcggctgtcggttatcaaccaaccttagccactgatatgggtcttttacaagaaagaattaccaccaccaccaagggttccgttacttctgtccaagctgtctacgtcccagccgatgatttaaccgatcctgctccagctaccactttcgcccacttggatgctaccactgtgttgtctcgtggtatctctgaattgggtatttacccagctgtcgatccattggattccaaatccagattgttagatgctgatatcgttggtaaagaacactacgaagttgccactggtgtccaacaaaccttacaagcttacaaatctttacaagatatcattgctattttaggtatggatgaattgtctgaagccgataaattgactgtcgaaagagccagaaagatccaaagattcttgtctcaaccattcgccgttgccgaagttttcaccggtatcccaggtagattagttagattgcaagacactgttaaatctttcaaggaagtcttagaaggtaaatatgatcacttaccag

SEQ ID NO: 463 - DNA, 1154 bp, Candida glabrata
  ref <308>: DATABASE ACCESSION NUMBER: ATCC 66032
tctggtcagaggcgagaaggtcgtcgacacaggtgccccaatctccgtccctgtcggcagagagaccctgggcagaatcatcaacgttatcggtgaacctatcgacgagcgtggcccaatcaactcaaagttgagaaagcctatccacgccgaccctccttccttcgcagaacagtccaccgccgccgaagtcctggaaacaggtatcaaggtcgtcgacttgctggccccttacgccagaggtggtaagatcggtctgttcggtggtgccggtgtcggtaagaccgtgttcatccaagaactgatcaacaacatcgcaaaggctcacggtggtttctccgtgttcacaggtgtcggtgaaagaaccagagaaggtaacgatttgtacagagaaatgaaggaaaccggtgtcatcaacttggaaggtgactctaaggtcgccttggtcttcggccaaatgaacgaaccaccaggagccagagccagagtcgccttgaccggtttgaccatcgcagaatacttcagagatgaagaaggtcaagatgtcctgctgttcgtcgacaacattttcagattcacccaagccggttcagaagtctccgctttgctaggtcgtatcccatccgccgtcggttatcaaccaaccttggccaccgatatgggtctgttgcaagaaagaattaccaccacaaagaagggttccgtcacttccgtccaagccgtctacgtgcctgcagatgatttaacagatcctgcccctgccactactttcgcgcacttggacgccaccaccgtcttgtccagaagtatctcagaattgggtatctacccagctgtcgacccattggactccaagtctagattgctagacgctgccgttgtcggtgaagagcattacaacgtcgccacaaaggtccaagaaactttacaaacttacaagtctctgcaagatatcatcgccattttgggtatggatgaattgtccgaacaagataagctaactgtcgaaagagcaagaaagatccaaagattcttgtcccaaccattcgctgtcgctgaagttttcaccggtatcgaaggtaagctggtcagattgaaggacaccatctcctctttcaaggctgtcttggaaggtaagtacgatgatcttccag

SEQ ID NO: 464 - DNA, 1293 bp, Candida guilliermondii
  ref <308>: DATABASE ACCESSION NUMBER: ATCC 6260
ccactacgaggacggtaaccttcctgctattttcaacgccttgactcttaagaacggtgaccaaaacttggttttggaagttgcccagcatttgggtgaaaacaccgtcagaaccattgctatggatggtactgaaggtttggttagaggtgccagcgtcactgacactggtgctcctatctctgtgcctgttggtcgtggtactttgggtcgtatcatcaacgttattggtgagccaattgacgagcgtggaccaatcgagtccaagcaaaagaagcccattcacgctgaaccaccatcgttcgtcgaacaatccacttctgccgaggttttggaaaccggtatcaaggttgtcgacttgttggctccatacgccagaggtggtaagattggattgttcggtggtgccggtgtcggtaagactgtgtttatccaagagttgattaacaacattgccaaggctcacggtggtttctccgtgttcaccggtgtcggtgaaagaaccagagaaggtaacgatttgtaccgtgaaatgaaggaaactggtgtcatcaacttggaaggtgaatccaaggtggccttggtgttcggtcaaatgaacgaacctccaggagctagagccagagttgcccttaccggtttgaccatcgctgaatacttcagagatgaggagggtcaagatgtgttgttgttcgtcgacaacattttcagattcactcaagctggttctgaagtgtcggctttgttgggtcgtattccttcggctgtcggttaccaacctactttggccaccgatatgggtttgttgcaagagcgtattaccaccaccaagaagggttccgtcacctctgtccaagctgtctatgtgccagccgatgatttgaccgatcctgctcctgctactacttttgctcacttggatgctaccactgtgttgtctagaggtatctccgagttgggtatttacccagctgtcgatcctttggattccaagtcgagattgttggatgcctctgttgtcggtgaggagcactactcggttgcttctaacgttcaacaaaccttgcaagcttacaagtctttgcaagatatcattgccattttgggtatggacgaattgtcggaagctgacaagttgaccgtcgagagagcccgtaagatcgagagattcttgtctcaaccatttgctgttgccgaagttttcactggtatcagtggtaagttggtcagattggaggacactatcagatctttcaaggaagtcttggaaggtaagtacgatcacttgccaga

SEQ ID NO: 465 - DNA, 1293 bp, Candida haemulonii
  ref <308>: DATABASE ACCESSION NUMBER: ATCC 22991
cactttgacgatggtaacttgccagccattttcaacgccttgaagttgaagaacggtgaccaggacttggtcttggaggtcgcccagcacttgggtgagaacaccgtcagaaccattgccatggacggtaccgatggtttggtcagaggcgaggctgtcactgacactggtgctccaatctccgtgcctgttggtcgtgagactttgggtcgtatcatcaacgttattggtgagccaattgacgagagaggaccaatcaagtccaagaagagaaacccaatccacactgacccaccaaccttcgttgagcagtctacttctgctgaggttttggagactggtattaaggttgtcgacttgttggccccttacgccagaggtggtaagattggtttgttcggtggtgccggtgtcggtaagaccgtctttatccaagagttgattaacaacattgccaaggcccacggtggtttctctgtctttaccggtgtcggtgagagaaccagagaaggtaacgatttgtaccgtgaaatgcaggagaccggtgtcatcaacttcgagggtgactccaaggtcgccttggtcttcggtcagatgaacgagccaccaggagctagagctagagttgctttgaccggtttgaccattgccgaatacttcagagatgaagaaggtcaggatgtgttgttgttcgttgacaacattttcagattcactcaggctggttccgaggtgtccgccttgttgggtcgtattccatctgctgtcggttaccagccaaccttggccaccgatatgggtaccttgcaagaaagaattaccaccaccaagaagggttccgtcacctctgtccaggccgtttacgtgccagctgatgatttgaccgatcctgccccagctaccactttcgctcacttggatgctaccactgtgttgtctagaggtatttccgagttgggtatctacccagctgtcgacccattggactccaagtctagattgttggatgcctctgttgtcggtaaggagcactacgatgttgctaccaacgtccagcagaccttgcaggcctacaagtccttgcaggatatcattgccattttgggtatggatgaattgtccgaagccgacaagttgactgtcgagagagctagaaagattcagagattcttgtcccagccattcgccgtcgccgaggttttcactggtatcgagggtaagttggtcagattggaggagaccgtcaagtctttcaaggaggtcttggatggtaagtacgaccacttgccagag

SEQ ID NO: 466 - DNA, 1111 bp, Candida inconspicua
  ref <308>: DATABASE ACCESSION NUMBER: ATCC 16783
aacggtggatctaagttagtcttagaagttgctcaacatttgggtgaaaacactgtcagaaccattgctatggatggtactgaaggtttagttagaggtcaaccagttaatgatactggtgctccaatctctgtcccagtcggtagaggtactttaggtagaatcttaaacgttattggtgatccagtcgatgaaagaggtccaattgattgtaaggaaagaaaaccaattcatcaagatcctcctgctttcgttgaacaatctactgaagctgaagttttagaaaccggtattaaggttgttgatttattagctccttacgctagaggtggtaagattggtttattcggtggtgctggtgtcggtaaaaccgttttcattcaagaattaattaacaatgttgcaaaggctcatggtggtttctcagttttcactggtgtcggtgaaagaaccagagaaggtaatgatttatacagagaaatgaaggaaactggtgttattaacttagaaggtgaatctaaggtcgccttagttttcggtcaaatgaatgaaccaccaggagcaagagcaagagttgctttaaccggtttaactattgctgaatacttcagagatgaagaaggtcaagatgtcttgttattcattgataacattttcagatttactcaagcaggttctgaagtttctgcattgttaggtagaattccatccgctgtcggttatcaaccaactttagcaactgatatgggtcttttacaagaaagaattacaactactaagaaaggttccgttacttctgtccaagcagtttatgtcccagcagatgatttaactgatcctgctccagcaactactttcgcccacttagatgcaactactgtcttatctagaggtatttccgaattaggtatttacccagctgtcgatccattagattctaaatctagattattagatgttgctgttgttggtcaagaacattatgatgttgcaactcaagttcaagaaactttacaagcatacaaatctttacaagatattattgctattttaggtatggatgaattatctgaacaagataaattaaccgttgaaagagcaagaaagattc

SEQ ID NO: 467 - DNA, 1283 bp, Candida kefyr
  ref <308>: DATABASE ACCESSION NUMBER: ATCC 28838
tcgaacaaggtcaattgccagaaattttgaacgctttggagattgawactcctcaaggtaagttggttttggaagttgcccaacatttgggtgaaaacaccgtcagaaccattgctatggacggtaccgaaggtttggtccgtggtgagaaggttttggacactggtgctccaatttccgtcccagtcggtagagaaactttgggtagaatcatcaacgttattggtgagccaattgacgaaagaggcccaatcaagtccaagatgagaaagccaattcacgctgaccctccatcctttgttgaacaatccactgctgctgaagttttggaaaccggtatcaaggttgtcgacttgttggccccatacgccagaggtggtaagattggtttgttcggtggtgccggtgtcggtaagaccgttttcatccaagagttgattaacaacattgccaaggcccatggtggtttctccgtcttcaccggtgtcggtgaaagaaccagagaaggtaacgatttgtaccgtgaaatgaaggaaaccggtgtcatcaacttggaaggtgactccaaggtcgccttggtcttcggtcaaatgaacgaaccacctggagctagagccagagttgccttgaccggtttgactatcgctgaatacttcagagatgaagaaggtcaagatgtgttgttgtttatcgacaacattttcagattcacacaagccggttccgaagtgtccgctttgttgggtcgtattccatccgctgtcggttaccaacctactttggccaccgatatgggtttgttgcaagaaagaattaccactaccaagaagggttccgttacctccgtccaagctgtctacgtccctgctgatgatttgactgatcctgctccagctacyactttcgcccatttggacgccaccaccgtgttgtccagaggtatctccgaattgggtatctacccagctgtcgatccattggattccaagtctagattgttggacgctgccgttgtcggtcaagaacattacgacgtcgctactcaagttcaacaaactttgcaagcttacaagtctttgcaagatatcattgccattttgggtatggatgaattgtctgaacaagacaagttgactgtcgaaagagccagaaagatccaaagattcttgtctcaaccattcgccgtcgccgaagttttcactggtatcccaggtagattggtcagattaaaggacaccatcgcttccttcaaggctgttttggaaggtaagtacgatcacttg

SEQ ID NO: 468 - DNA, 1287 bp, Candida krusei
  ref <308>: DATABASE ACCESSION NUMBER: ATCC 34135
cttcgaacaaggccaattaccacaaattttaaacgctttagttatggataatggtggtaacaagttagttttagaagttgctcaacatttaggtgaaaacactgtcagaaccattgctatggatggtactgaaggtttagttagaggtcaaaccgttaacgataccggtgctccaatctctgtcccagttggtagaggtaccttaggtagaatcttgaacgtcattggtgatccagtcgatgaaagaggtccagttgactgtaaggaaagaaagccaattcacgctgatcctccagctttcgttgaacaatccactgaagctgaagttttggaaactggtattaaggttgtcgatttattagcaccttacgcaagaggtggtaagattggtttattcggtggtgctggtgttggtaagaccgtttttatccaagaattgatcaacaatgtygcaaaggctcatggtggtttctccgttttcactggtgttggtgaaagaaccagagaaggtaacgatttatacagagaaatgaaggaaactggtgttattaacttggaaggtgaatccaaggtcgccttagttttcggtcaaatgaacgaaccaccaggagctagagcaagagttgctttaactggtttgaccattgcagaatatttcagagatgaagaaggtcaagatgtcttgttattcattgataacattttcagattcacccaagcaggttctgaagtctctgcattattaggtagaattccatctgctgtcggttatcaaccaactttagcaaccgatatgggtcttttacaagaaagaattaccaccaccaagaagggttccgttacttctgtccaagctgtttatgtcccagccgatgatttaaccgatcctgctccagctactactttcgcccacttggatgcaaccactgtcttgtcyagaggtatttccgaattaggtatctacccagctgtcgatccattagattctaagtctagattattagatgttgcagttgttggtcaagaacattatgaagttgcaactcaagtccaagaaactttacaagcttacaagtctttacaagatattattgctattttgggtatggatgaattatctgaacaagataagttaacygttgaaagagcaagaaagatccaaagattcttatctcaaccattctctgttgcagaagttttcactggtattccaggtaagttagtcagattagaagaaaccatcaagtctttcagggatgttcttgcaggtaagtacgatcacttacc

SEQ ID NO: 469 - DNA, 1283 bp, Candida lambica
  ref <308>: DATABASE ACCESSION NUMBER: ATCC 24750
tcgaacaaggtcaattaccaccaattcttaacgctttggtcatggaaaacgatggtcaaaagttagttttggaagttgctcaacatttgggtgaaaacaccgtcagaaccattgctatggacggtaccgaaggtttagttagaggtcaacctgttaacgacactggtgctccaatctctgtcccagttggtagaggtactcttggtagaatcttgaacgtcactggtgacccagtygatgaaagaggtcctgtcgamtgtaaggagagaagaccaattcaccaagacccacctgctttcgttgaccaatccactgaagctgaagttttggaaaccggtattaaggttgtcgatttattagcaccttacgctagaggtggtaagattggtttgttcggtggtgctggtgtcggtaagaccgttttcatccaagaattgattaacaatgttgctaaggcccacggtggtttctccgttttcactggtgtcggtgaaagaaccagagaaggtaacgatttatacagagaaatgaaggaaaccggtgttattaaccttgaaggtgaatctaaggtcgccctcgttttcggtcaaatgaacgaaccaccaggagcaagagctagagttgctcttactggtttgaccattgctgaatacttcagagatgaagaaggtcaagatgtcttgcttttcattgacaacattttcagattcacccaagcaggttccgaagtgtctgctttgttaggtagaattccwtctgccgttggttaccaaccaaccttagcaaccgatatgggtttgttacaagaaagaattaccaccaccaagaagggttccgtcacctccgtccaagctgtttacgtcccagctgatgatttractgaccctgcaccagcaaccactttcgcccacttggatgctaccaccgtcttgtctagaggtatttccgaattaggtatttacccagctgtcgatccattagattctaagtctagattattggatgtcgctgttgtcggtcaagaacattataccgttgcaacycaagtccaagaaactttacaagcttacaagtccttacaagatatcattgctattttgggtatggacgaattatctgaacaagataagcttactgttgaaagagcaagaaagatccaaagattcctttcccaacctttctccgtcgcagaagttttcactggtatcccaggtaagcttgtcagattagaagaaaccattatttctttcagagatgtcctcgatggtaagtacgaccactta

SEQ ID NO: 470 - DNA, 1140 bp, Candida lusitaniae
  ref <308>: DATABASE ACCESSION NUMBER: ATCC 66035
aggtgcctctgtcactgacactggttctccaatctctgtccctgttggtcgtgaaaccttgggtagaattatcaacgttgttggtgagccaattgacgagagaggcccaatcaactccaagaagagaaacccaattcacactgagccaccatcgtttgttgaacaatccacttctgctgaagttttggagactggtatcaaggttgtcgacttgttggccccttacgccagaggtggtaagattggtttgttcggtggtgccggtgtcggtaagaccgttttcatccaagagttgattaacaacattgccaaggcccacggtggtttctctgttttcactggtgtcggtgaaagaaccagagaaggtaacgatttgtaccgtgaaatgcaagagaccggtgtcatcaacttcgagggtgactccaaggtcgccttggtcttcggtcaaatgaacgaaccaccaggagccagagctagagttgctttgaccggtttgactattgccgagtacttcagagacgaagagggccaagatgtcttgttgttcgttgacaacattttcagattcacccaggccggttctgaagtgtctgctttgttgggtcgtattccatccgctgtcggttaccaaccaaccttggccaccgatatgggtgctttgcaagagagaattaccaccaccaagaagggttccgtcacctctgtccaagccgtttatgttccagctgatgacttgactgaccctgctccagccaccaccttcgcccacttggacgccaccactgtgttgtccagaggtatctctgaattgggtatctacccagctgtcgacccattggactccaagtctagattgttggacgcttctattgttggtaaggagcactacgaagttgcttctaacgttcaacaaactttgcaagcttacaagtctttgcaagatatcattgccattttgggtatggatgaattgtctgaggctgacaagttgaccgttgagagagccagaaagatccaaagattcttgtctcaaccattcgctgttgccgaggttttcactggtatcccaggtagattggtcagattggaggacactgtcagatccttcaaggaagttttggacggtaagtacgaccactt

SEQ ID NO: 471 - DNA, 1296 bp, Candida norvegensis
  ref <308>: DATABASE ACCESSION NUMBER: ATCC 22977
tcaattcgaacaaggtcaattaccaccaattttaaacgctttagtcatggacaacggtggaactaagttagttttagaagttgctcaacatttaggtgaaaacaccgtcagaaccattgctatggatggtactgaaggtttagttagaggtcaaccagttaatgatactggtgctccaatctctgtcccagtcggtagaggtactttaggtagaatcttaaacgttattggtgatccagtcgatgaaagaggtccaatcgattgtaaggaaagaaaaccaattcatcaagatcctcctgctttcgttgaacaatcaactgaagctgaagttttagaaactggtattaaagttgtcgatttattagctccttacgctagaggtggtaagattggtttattcggtggtgcaggtgttggtaaaaccgtttttattcaagaattaattaacaatgttgcaaaagctcatggtggtttctccgttttcactggtgtcggtgaaagaactagagaaggtaacgatttatacagagaaatgaaggaaactggtgttattaatttagaaggtgattctaaggtcgcattagttttcggtcaaatgaacgaaccacctggagcaagagcaagagttgctttaactggtttaactattgctgaatatttcagagatgaagaaggtcaagatgtcttgttattcattgataacattttcagatttactcaagcaggttctgaagtttccgctttgttaggtagaattccatccgctgtcggttatcaaccaactttagcaactgatatgggtcttttacaagaaagaattactactactaagaaaggttctgttacttccgttcaagcagtttatgtcccagcagatgatttaactgatcctgctccagcaactactttcgcccacttagatgcaactactgtcttatctagaggtatttccgaattaggtatttacccagctgtcgatccattagattctaaatctagattattagatgttgcagttgttggtcaagaacattatgatgttgcaactcaagttcaagaaactttacaagcttacaaatctttacaagatattattgctattttaggtatggatgaattatctgaacaagataaattaaccgttgaaagagctagaaaaattcaaagattcttatctcaacctttctctgtcgcagaagttttcactggtatcccaggtaagcttgttagattagaagaaactatttcttcattcagagatgtcttagcaggtaagtacgatcacttaccagaaaa

SEQ ID NO: 472 - DNA, 1297 bp, Candida parapsilosis
  ref <308>: DATABASE ACCESSION NUMBER: ATCC 90018
acacttcgaagaaggaaacttgccagctattttgaacgctttgaccttgaaaaacggtaaacaagacttggtcttggaagttgcccaacatttgggtgaaaacaccgtcagagcaattgctatggatggtactgaaggtttagttagaggtacttctgtcactgacactggtgccccaatttctgtcccagttggtagaggtactttgggtagaatcatcaatgttactggtgacccaattgatgaaagaggtccaattgaatgtaagaagagaaacccaatccacgctgaaccaccttcattcattgaacaatccactgctgctgaagttttggaaaccggtattaaggttgtcgacttgttggctccatacgctagaggtggtaagattggtttgttcggtggtgccggtgtcggtaaaaccgtgtttatccaagaattgatcaacaacattgccaaggcacatggtggtttctcggttttcactggtgttggtgaaagaaccagagaaggtaacgatttgtaccgtgaaatgaaggaaactggtgttatcaacttggaaggtgactccaaggtcgctttggttttcggtcaaatgaacgaaccacctggagctagagctagagttgctttgactggtttgaccattgctgaatactttagagatgaagaaggtcaagatgtcttgttgtttattgacaacattttcagattcacccaagctggttcagaagtgtctgctttgttgggtcgtattccatccgctgtcggttatcaaccaaccttggccaccgatatgggtcttttgcaagaacgtattaccactaccaaaaagggttcagttacttcagtccaagccgtttacgtgccagctgatgatttaaccgatcctgctccagctaccactttcgctcacttggatgccaccactgtgttgtctagaggtatttcggagttgggtatttacccagctgtcgatccattggattccaaatccagattgttggatgctgccgttgttggtcaagaacattacgacgttgccactggtgttcaacaaactttacaagcttacaagtccttgcaagatatcattgctatcttgggtatggatgaattgtccgaacaagataaattgactgtcgaaagagctcgtaagattcaaagattcttgtctcaaccatttgctgtcgctgaagttttcactggtattccaggtaaattggttagattgtctgaaactgtcaagtcattcaaggaagtcttggaaggtaagtacgataacttgccagaaaat

SEQ ID NO: 473 - DNA, 1285 bp, Candida rugosa
  ref <308>: DATABASE ACCESSION NUMBER: ATCC 96275
ccagtttggcaacgacctccctgccattttgaacgccctcactcttcagcgtgaagacggtaacaagcttgttcttgaggttgcccagcatctcggtgagaacaccgtccgtaccattgctatggacggtaccgagggtttggtgcgtggcactggtgtccacgacaccggacaccccatcatgactcccgtcggtgacggtaccctgggacgtattcttaacgtcaccggtgaccctgtagacgagcgtggtcccgtcaagactgacaagttccgccccatccacgccgaggcccctgccttcgatgagcaggctaccagtgccgaggttcttgagaccggtatcaaggttgtcgacttgctcgctccttacgccaagggtggtaagattggtttgttcggtggtgccggtgtcggcaagaccgtcttcatccaggagctgattaacaacatcgccaaggcccacggtggttactccgtgttcactggtgtcggtgagcgtactcgtgagggtaacgatttgtacaaggaaatgatcgagtccggtgtcatcaacctcgatggtgagtccaaggtcgccttggtgttcggtcagatgaacgagccccctggagcccgtgcccgtgtcgcccttaccggtcttaccatcgctgagtatttccgtgatgaggagggtaaggatgtcttgttgttcgttgacaacattttccgcttcactcaggccggttctgaggtgtccgccttgcttggtcgtattccttccgctgtcggttaccagcctaccctggccaccgatatgggtgcccttcaggagcgtatcaccaccaccaagaagggttccgttacatccgtccaggccgtctacgtccctgccgatgatttgactgatcccgcccctgccaccaccttcgcccatttggatgccaccactgtcttgtctcgtgccatctctgagttgggtatctaccccgctgtcgaccctctcgactccaagtcccgtcttcttgacgccgctgtcgttggtcaggagcactacgatactgccacctccgttcagcagactttgcaggcttacaagtctttgcaggatatcattgccattcttggtatggatgagttgtccgagtctgacaagctcaccgtcgagcgtgctcgtaagatccagcgtttcctctcccagcctttcgctgttgctgaggtcttcactggtattcagggccgtcttgttcctctcaaggacactgtccgctccttcaaggagattctcgaaggtaagtacgatgct

SEQ ID NO: 474 - DNA, 1283 bp, Candida sphaerica
  ref <308>: DATABASE ACCESSION NUMBER: ATCC 2504
ttgaacaaggtcaattgccagctattttgaacgctttggaaatcgacactccagaaggaaagttggttttggaagtcgctcaacatttgggtgaaaacactgtcagaaccattgctatggatggtactgaaggtttagtccgtggtgaaaacgtttctgacactggtgctccaatttccgtcccagttggtagagaaaccttgggtagaattatcaacgttattggtgagccaattgacgaaagaggtccaatcaactccaagatgagaaagccaattcatgctgatcctccattattcgttgaacaatccactgctgctgaagttttggaaactggtatcaaggttgtcgacttgttggccccatacgccagaggtggtaagattggtttgttcggtggtgccggtgtcggtaagaccgttttcatccaagaattgattaacaacattgccaaggctcatggtggtttctctgtcttcactggtgtcggtgaaagaaccagagaaggtaacgatttgtaccgtgaaatgaaggaaactggtgttatcaacttggaaggtgattctaaggtcgcgttggttttcggtcaaatgaacgaacctcctggagctagagctagagtcgccttgactggtttgaccatcgctgaatacttcagagatgaagaaggtcaagatgtcttgttgtttatcgacaacattttcagattcacacaagccggttccgaagtgtccgctttgttgggtcgtattccatccgctgtcggttatcaaccaactttggccaccgatatgggtttgttgcaagaaagaattactaccaccaagaagggttccgtcacttctgtccaagccgtttacgtgccagctgatgatttgactgatcctgctccagctaccactttcgcgcatttggatgccaccactgtgttgtccagaggtatctctgaattgggtatctacccagctgtcgatcctttggattccaaatctagattgttggatgctgccgtcgttggtcaagaacattacgatgtcgctactcaagttcaacaaactttgcaagcttacaagtctttgcaagatatcattgccattttgggtatggatgaattgtccgaacaagataagttgaccgtcgaaagagctagaaagattcaaagattcttgtctcaacctttcgctgtcgctgaagtcttcactggtatcccaggtagattggtcagattaaaggacaccatctcttctttcaaggctgtcttggacggtaagtacgatcacttg

SEQ ID NO: 475 - DNA, 1290 bp, Candida tropicalis
  ref <308>: DATABASE ACCESSION NUMBER: ATCC 13803
cgacgaaggtaacttgccagctattttgaatgctttgactttgaagaacggtgaccaagacttggttttggaagttgctcaacatttgggtgaaaacaccgtcagggctattgctatggatggtaccgaaggtttagtcagaggtactgctgtcactgataccggtgctccaatttctgtcccagttggtagaggtaccttgggtagaattatcaacgttgttggtgaaccaattgatgacagaggtccaattgaatgtaaggaaagaaagccaattcacgctgaaccaccttcattcgttgaacaatctactgctgccgaaattttggaaaccggtattaaggttgtcgatttgttggctccttacgctagaggtggtaagattggtttgttcggtggtgctggtgtcggtaaaaccgtcttcatccaagaattgattaacaacattgccaaagctcatggtggtttctctgtctttaccggtgtcggtgaaagaaccagagaaggtaacgatttgtaccgtgaaatgaaagaaactggtgtcatcaacttggaaggtgactccaaggtcgccttggtcttcggtcaaatgaacgaaccacctggtgctagagctagagttgctttgactggtttgaccattgctgaatacttcagagatgaagaaggtcaagatgtcttgttgttcattgacaacattttcagattcacccaagctggttccgaagtgtctgctttgttgggtcgtattccatctgctgtcggttatcaaccaaccttggccactgatatgggtcttttgcaagaacgtattaccaccaccaagaaaggttctgttacttctgtccaagctgtttatgtcccagccgatgatttaaccgatccagctccagctaccaccttcgctcacttggatgccactactgtcttgtctagaggtatttctgaattgggtatttacccagctgtcgatccattggattctaaatccagattattggatgctactgttgttggtcaagaacattatgatgttgccactggtgttcaacaaactttacaagcttacaagtccttgcaagatatcattgctattttgggtatggatgaattgtccgaagccgataaattgactgtcgaaagagctcgtaagattcaaagattcttgtcccaaccattcgctgttgccgaagttttcactggtatcccaggtagattggttagattacaagatactgttaaatctttcaaagatgtcttggaaggtaaatacgatcacttgccagaaaa

SEQ ID NO: 476 - DNA, 1267 bp, Candida utilis
  strain Csp 388
tttgaacgcccttgagatcaagaaccacgagtctggaagattggtcctcgaggttgcccagcacttgggtgagaacactgtcagaactattgccatggatggtaccgaaggtctcgtccgtggtgagtctgttgttgacaccggttctccaattactgtcccagttggtcgtgagaccttgggtcgtatcatcaacgttattggtgagccaattgatgagcgtggtccaatcaacaccaagcacagaaacccaattcacgctgagccaccatccttcgctgagcagtctactgctgctgaggttttggagactggtatcaaggttgtcgaccttctcgccccatacgccagaggtggtaagattggtctctttggtggtgccggtgtcggtaagaccgttttcatccaggagttgattaacaacattgccaaggcccacggtggtttctctgttttcaccggtgtcggtgagagaaccagagagggtaacgatttgtaccgtgagatgaaggagactggtgtcatcaatctcgagggtgagtccaaggttgctctcgtcttcggtcagatgaacgagccaccaggtgcccgtgcccgtgtcgctttgaccggtttgaccattgctgagtacttcagagatgaggagggtcaggatgtcttgttgtttattgacaacattttcagattcacccaggccggttccgaggtgtctgccttgcttggtcgtattccatccgctgtcggttaccagccaactttggccaccgatatgggtttgttgcaggagagaattaccaccacccagaagggttccgtcacttctgtccaggccgtttacgtcccagctgatgatttgactgatcctgctccagccaccactttcgcccacttggacgccaccactgtgttgtcccgtggtatctctgagttgggtatttacccagctgtcgacccattggactccaagtccagattgttggacgctgccgttgttggtgacgagcactacaacaccgccaccgatgtccagcagacccttcaggcttacaagtctctccaggatatcattgctattttgggtatggatgagttgtctgaggctgacaagttgactgtcgagagagccagaaagattcagcgtttcctttcccagccattcgctgtcgctgaggttttcaccggtatcccaggtagattggttagacttcaggacaccatcaagtccttcagagaggttttggacggtaagtacgaccacttgccagag

SEQ ID NO: 477 - DNA, 1296 bp, Candida viswanathii
  ref <308>: DATABASE ACCESSION NUMBER: ATCC 28269
ccaattcgacgaaggtagcttgccagctatcttgaacgccttgaccttgaagaacggtgaccaagacttggtcttggaagttgcccaacacttgggtgaaaacactgtcagagctattgctatggatggtaccgaaggtttggtcagaggtactgctgtcactgacaccggtgctccaatctccgtcccagtcggtagaggtaccttgggtagaatcatcaacgttgttggtgaaccaattgacgacagaggtccaattgaatgtaaggaaagaaagccaattcacgctgaaccaccttctttcgttgaacaatccactgctgccgaaattttggaaaccggtatcaaggttgtcgacttgttggccccatacgccagaggtggtaagattggtttgttcggtggtgccggtgtcggtaagactgtctttatccaagagttgattaacaacattgccaaggcccatggtggtttctctgtcttcactggtgtcggtgaaagaaccagagaaggtaacgatttgtaccgtgaaatgaaggaaaccggtgtcatcaacttggaaggtgactccaaggtcgccttggttttcggtcaaatgaacgaaccacctggtgctagagctagagttgctttgactggtttgaccattgccgaatacttcagagacgaagaaggtcaagatgtcttgttgtttattgacaacattttcagattcacccaagccggttccgaagtgtctgctttgttgggtcgtattccatctgccgtcggttatcaaccaaccttggccaccgatatgggtcttttgcaagaacgtattaccaccaccaagaagggttccgtcacctctgtccaagctgtctatgtcccagccgatgatttgaccgatcctgctccagccaccaccttcgctcacttggatgccactactgtcttgtctagaggtatttccgaattgggtatctacccagctgtcgatccattggactccaagtccagattgttggatgctgctgttgttggtcaagaacattacgatgttgccactggtgtccaacaaaccttgcaagcttacaagtctttgcaagatatcattgccattttgggtatggatgaattgtctgaatccgataagttgactgtcgaaagagctcgtaagatccaaagattcttgtcgcaaccatttgctgttgccgaagttttcactggtatcccaggtagattagttagattgctggaaaccgtccaatctttcaaagacgtcttggctggtaaatacgatcacttgccagaaaa

SEQ ID NO: 478 - DNA, 1295 bp, Candida zeylanoides
  ref <308>: DATABASE ACCESSION NUMBER: ATCC 7351
tcaattcgagcaaggcaacctccctgccatcttgaacgctctcaccttgaagaatggtgacaacgacttggttttggaagttgcccagcacttgggtgagaacaccgtcagagccattgccatggatggtaccgagggtttggttagaggtgcgtccgtcaaggacactggcgcccctatctcggtccccgttggccgcgggactttgggtcgtatcatcaacgtcaccggtgaccccattgacgagagaggtcccatcgagctgacccagagaaaccctatccacgccgaccccccctcgttcgttgagcagtccaccaacgctgaggttttggagactggtatcaaggttgtcgatttgttggctccctacgccagaggtggtaagattggtttgttcggtggtgccggtgtcggtaagaccgtcttcattcaggagttgatcaacaacatcgccaaggcccacggtgggttctcggtcttcactggtgtcggtgagagaactagagagggtaacgacttgtaccgtgagatgaaggagaccggtgtcatcaacttggagggtgactccaaggtggccttggtgttcggtcagatgaacgagccccctggagccagagccagagtcgccttgaccgggttgaccattgccgaatactttagagacgaggagggtcaggatgtgttgttgttcgtcgacaacatcttcagattcacccaagctggttcggaggtgtcggccttgttgggtcgtattccctctgccgtcggttaccagcccaccttggcaactgatatgggattgttgcaggagcgtatcaccacgaccaagaagggttccgtcacctcagtgcaggccgtctacgtccccgctgatgacttgactgaccctgctcccgccaccacctttgcccacttggacgccaccaccgtgttgtccagaggtatctctgagttgggtatctaccccgccgtcgaccccttggactccaaatcgagattgttggacgctgccgtggtcggtcaggagcactacgatgttgcctcgaacgtccagcagaccttgcaggcctacaagtccttgcaggatatcattgccattttgggtatggatgagttgtccgaggctgacaagttgaccgttgagagagccagaaagatccagagattcttgtcgcagcccttcgctgttgccgaggttttcactggtatcaagggtagattggtcagattggaggacaccgtcagatctttcaaggaggttttggagggtaagtacgaccacttgcccgaga

SEQ ID NO: 479 - DNA, 534 bp, Coccidioides immitis
  strain Silveira
ttcaggaattgattgtaagttctgttatcaactaaagccgacagcggttgctgatatgctctagaacaacattgctaaggctcacggtggttactccgtgttcactggtgtcggtgagcgtacccgtgagggtaacgatttgtaccatgaaatgcaagagacccgtgtcattcaactcgacggagagtccaaggtcgctcttgtcttcggtcaaatgaacgagccccctggtgcccgtgcccgtgttgcccttaccggtttgaccattgctgaatacttccgtgacgaggaaggccaagacggtaggcttcatgcttctatcgctaggggcgtgtgatacaggaggctaatcgcttttctagtgcttctctttattgacaacattttccgtttcactcaagctggttctgaagtgtctgccttgctcggtcgtattccttccgctgtcggttaccaacctactctcgccgtcgacatgggtgttatgcaggaacgtatcaccaccaccaccaagggatccattacttcagtgca

SEQ ID NO: 480 - DNA, 494 bp, Cryptococcus albidus
  ref <308>: DATABASE ACCESSION NUMBER: ATCC 66030
cgtcttgattcaagaattgatcaacaacatcgccaaggcccacggtggttactcggtcttcaccggtgtcggtgagcgaactcgagagggtaacgatctgtaccacgaagtgagttgcgccgtccgagtgtttcccggggaatcgcaagactgatgttgtcccttcttctcagatgagggaaaccggtgtcatcaacctcgagggtgactccaaggtcgccttggtcttcggtcagatgaacgagccccctggagcccgagcccgagtcgccttgaccggtttgaccattgccgaatacttccgagacgaggagggtcaggatgtcttgttgttcattgacaacattttccgattcacccaagccggttccgaagtgtccgccttgttgggtcgtatcccctccgccgtcggttaccagcccactctgtccaccgacatgggtaccatgcaggagcgaattaccaccaccaagaagggttccatcacttccgtc

SEQ ID NO: 481 - DNA, 415 bp, Fusarium oxysporum
  strain WSA-212
ttcaggagcttatcaacaacatcgccaaggcccacggtggttactccgtcttcactggtgtcggtgagcgaactcgtgagggtaacgatctgtaccacgaaatgcaggagacttccgtcattcagcttgatggcgagtccaaggtcgccctggtcttcggtcagatgaacgagccccctggagctcgtgcccgtgtcgcccttaccggtcttactgtagctgaatacttcagagatgaggagggtcaggacgtgctgctcttcattgacaacattttccgattcactcaggccggttccgaggtgtctgcccttctcggtcgtatcccctctgccgtcggttaccagcccaccctcgccgtcgacatgggtggtatgcaagagcgtattaccaccaccaccaagggttccattac

SEQ ID NO: 482 - DNA, 1281 bp, Geotrichum spp.
  strain LEV-4
aggacaacctccccgctattcttaacgctcttgagcttaagagagataacggtgagaagctcgttctcgaggttgcccagcatctgggtgagaacactgtccgtactattgctatggacggtactgagggtctcgtccgtggtcagcccgttgttgacaccggtgcccccattaccattcccgttggtcgtggtactcttggtagaattatcaacgtcattggtgagcccatcgatgagcgtggacccattgaggctaccaagtacctccccatccacaccgagccccccaccttcgctgagcagtctacctccgctgaggttcttgagactggtatcaaggttgtcgatctccttgccccctacgcccgtggtggtaagattggtctcttcggtggtgccggtgtcggtaagaccgttttcattcaggagctgattaacaacattgccaaggcccatggtggtttctccgttttcaccggtgtcggtgagagaacccgtgagggtaacgatttgtaccgtgagatgaaggagaccggtgtcatcaacctcgagggtgagtctaaggtcgctctcgttttcggtcagatgaacgagccccctggagcccgtgcccgtgttgctcttactggtcttaccattgctgagtacttccgtgatgaggagggtcaggatgtgttgctcttcgttgacaacattttccgtttcactcaggccggttccgaggtgtctgcccttttgggtcgtattccctccgctgtcggttaccagcccacccttgccactgatatgggtgccctgcaagagcgtattaccaccacccagaagggttccgtcacttccgtccaggccgtctacgtccctgccgatgatttgaccgatcctgcccctgctaccaccttcgcccatttggatgccaccaccgtcttgtcgcgttccatttctgagttgggtatctaccccgctgtcgatccccttgattccaagtctcgtcttttggatatcaccgtcgttggccaggagcactacgatgttgctacccaggtccagcagaccctccagtcctacaagtctcttcaggatatcattgccattttgggtatggatgagttgtctgaggctgataagcttactgtcgagcgtgcccgtaagatccagagattcctttcccagcccttcactgtcgctgaggttttcactggtatcgagggccgtctcgttcctttgaaggacactgttcgctctttcaaggagatccttgagggcaagtacgaccacctcc

SEQ ID NO: 483 - DNA, 586 bp, Histoplasma capsulatum
  strain G186A5
attcaagaattgatcgtacgttcctccgccccacacacgatcaatggagaaagaaacaaattttttgggagtggtcattttttctaataattcgaatagaacaacattgccaaagcccacggtggttactccgtgttcactggtgtcggcgagcggacccgtgaaggaaatgacttgtaccacgaaatgcaggaaacccgtgttatccagctcgatggagagtccaaggtcgccctcgttttcggtcagatgaacgagcctcccggagcccgtgcccgtgttgccctcactggtctgaccgttgccgagtacttccgtgacgaggaaggccaagacggtatgtataagtatacaccgtagcaaatcaacacagagcttcactcacgctcggatttagtgcttctcttcatcgacaacattttccgcttcactcaggccggttccgaagtgtctgccctgctcggccgtattccctccgccgtcggttaccaacccaccctcgccgtggacatgggtggtatgcaggaacgtatcaccactaccaccaagggctccatcacctctgtgcargccgtctacgtccccg

SEQ ID NO: 484 - DNA, 1145 bp, Malassezia furfur
  ref <308>: DATABASE ACCESSION NUMBER: ATCC 42132
gcgtggccagaaggtcattgacactggtgctcccatcaccatccccgtcggtggtgccacactgggtcgtattctgaacgtcacgggtgaccctattgacgagcgtggccccgttaagactgacgttttccgccccattcaccgtgacccccctgcctttgtcgagcagtcgactgatgccgagattctcgagactggtatcaaagtcgttgacctgattgccccttacgcccgtggtggtaagattggtctgttcggtggtgccggtgtcggtaagaccgtgcttatccaggagctcatcaacaacatcgccaaggcccacggtggtttctccgtgttcactggtgtcggtgagcgtactcgtgagggtaacgatttgtaccacgagatgattgaaaccggtgtcattaacctcgagggtgactcgaaggtggctctggtgttcggtcagatgaacgagcccccgggtgcccgtgcgcgtgtcgctcttactggtctgactgtggccgagtacttccgtgacgacgagggccaggatgtgctgctgttcattgacaacattttccgtttcacccaggccggttcggagacttcggctctgctgggtcgtatcccttcgtcggtcggttaccagcccactttgtcgaccgatatgggtgccatgcaggagcgtatcaccaccaccaagaagggttcgattacgtcggtgcaggccgtctacgtgcccgccgatgatgtcactgaccctgcccctgccactaccttcgcccaccttgacgctaccactgtgcttgaccgttcgatcgctgagctgggtatctaccccgctgttgacccgttgaactcgaactcgcgtatgcttgaccccgctattgtgggtcaggagcactacgacgtggcctctggcgtgcagaagctgctccaggactacaagtcgcttcaagatatcattgccattctgggtatggatgagctttctgaggaggacaagctcactgtcgagcgtgcccgtaagatgcagcgtttcatgtcgcagcctttcgctgtcgcccaggtctttactggtatcgaaggtcgtcttgttgccctgaaggacacgatcaaggcctgcaaggagatcctgtcgggcaagcacgacaacctcc

SEQ ID NO: 485 - DNA, 1261 bp, Malassezia pachydermatis
  ref <308>: DATABASE ACCESSION NUMBER: ATCC 42756
tcccgccatcttcaacgccctggaggtccaggacatgaagaacggtggccgccttgttctggaggttgcccagcaccttggtgagaacactgttcgttgcattgctatggacggtaccgagggtcttgtccgtggtcagaaggtccttgacactggtgccccgatcactatccctgtcggtaacggtaccttgggccgyatcctgaacgtcactggtgagcctgtggatgagcgtggtccggttaagactgacgtctaccgtccaatccaccgtgagcccccggcgttcgttgagcagtcgactgatgctgagattcttgagactggtatcaaggtggtcgacctgctcgccccatacgctcgtggtggtaagattggtctwttcggtggtgcyggtgtyggtaagaccgtgctgattcaggagcttatcaacaacattgccaaggcccacggtggtttctcggtgttcactggtgtcggtgagcgtactcgtgagggtaacgatctgtaccatgaaatgattgagactggtgtcatcaacgttgacggtgactcgaaggtcgctctcgtgttcggtcagatgaacgagcccccgggtgcccgtgcccgtgtcgccctgacyggtctgaccatcgccgagtacttccgtgacgacgagggtcaggatgtgctgctcttcattgacaacattttccgtttcactcaggctggttcggagacttcggctctgctgggtcgtatcccgtcggctgtcggttaccagcckacccttgccacggatatgggtgccatgcaggarcgtatyaccaccaccaagaagggttcgattacctcggtgcaggcygtttacgttccggccgacgatgtgactgaccctgccccggccacgaccttcgcccacttggacgccaccacggtgttggaccgttcgattgcygagctgggtatctacccggccgtcgacccgctgaactcgaagtcgcgtatgcttgacccgtcaattgtcggtgtggagcactacaacgttgcttcgggtgtccagaagcttctycaggactacaagtcgctccaagatatcattgccattctgggtatggatgagttgtcggaggaggacaagctcactgtcgagcgtgcccgtaagatgcagcgtttcctgtcgcagcctttcgctgtggcccaggtcttcactggtatcgagggtcgtcttgtgtcgctcaaggacaccatcaacgcctgcaaggagattctgtccggtaag

SEQ ID NO: 486 - DNA, 1282 bp, Metschnikowia pulcherrima
  DSM 70336
aggagggcaacttgccagctatcttcaacgctttgacgttgaagaacggcgaccagaagttggtcttggaggtggcccagcacttgggtgagaacaccgtcagaaccattgccatggacggtaccgagggtttggtcagaggcgcctctgtcaccgacacyggtgcccctatctccgtgcctgtcggccgtgagaccttgggtcgtattatcaatgttgttggtgagccaatcgacgagagaggcccaatcaacaccaagaagagaaaccctattcacaccgacccaccttcgtttgtccagcaatccacttccgccgaggtcttggagactggtatcaaggttgtcgacttgttggccccttacgccagaggtggtaagattggtttgttcggtggtgccggtgtcggtaagaccgtgttcatccaggagttgattaacaacattgccaaggcccacggtggtttctccgttttcaccggtgtcggtgagagaaccagagagggtaacgatttgtaccgtgaaatgcaggagactggtgtcatcaacttcgagggtgactccaaggtcgccttggttttcggtcagatgaacgagcctccaggagctagagcyagagttgccttgaccggtttgaccatcgccgagtacttcagagacgaggagggtcaggatgtgttgttgttcgtcgacaacattttcagattcacccaagccggttctgaggtgtctgccttgttgggtcgtattccatccgctgtcggataccagccaaccttggccaccgatatgggtgccttgcaggagagaattaccaccaccaagaagggttccgtcacctccgtccaggccgtctacgtgccagccgatgacttgactgaccctgcgccagccaccactttcgcccacttggacgccaccactgtgttgtccagaggtatctctgagttgggtatctaccccgctgtcgaccccttggactccaactccagattgttggacgccaccgttgttggccaggagcactacgacgtcgccaccaacgtccagcaaactttacaagcttacaagtccttgcaggatatcattgccattttgggtatggatgagttgtccgagacccgacaagttgacccgtcgagagagccagaaagatccagaagttcttgtcccagccatttgccgtcgccgaggttttcaccggtattgagggtagattggttagattggaggacaccgttagatcctttaaggaggttttggaaggtaagtacgaccacttg

SEQ ID NO: 487 - DNA, 482 bp, Penicillium marneffei
  strain WSA-214
tgtctttatccaggagttgattgtacgtctttacctttctgcctgactgtttacgacaactaacgaaagcgtagaacaacattgccaaggctcacggtggttactctgtcttcactggtgtcggtgaacgtactcgtgagggtaacgatttgtaccacgaaatgcaggaaactggtgtcattcagctcgagggtgaatccaaggtcgccctcgtgttcggtcagatgaacgagccccccggtgcccgtgcccgtgtcgctcttactggtttgaccattgccgagtacttccgtgacgaggaaggtcaggacgtgcttctcttcattgacaacattttccgtttcactcaggccggttctgaggtgtctgcccttctgggtcgtatcccctctgccgtcggttaccagcccacccttgccgtcgacatgggtatcatgcaggagcgtattaccaccaccaccaagggttccatcacctccgtc

SEQ ID NO: 488 - DNA, 1290 bp, Pichia anomala
  ref <308>: DATABASE ACCESSION NUMBER: ATCC 18205
tcgaacaaggtaacttaccagctatcttgaatgctttagaaatcaaaaccccaagtggtactccattagttttagaagttgctcaacatttaggtgaaaacactgtcagaactattgctatggatggtactgaaggtttagttcgtggtgaacaagttactgatactggttctccaatcactgtcccagttggtcgtgaaactttaggtcgtattatcaacgttgttggtgaaccaattgatgaacgtggtccaattaacaccaaacaaagaaacccaattcacgctgaaccaccttcattcagtgaacaatcaactgctgctgaagttttagaaactggtatcaaagttgtygatttattagctccatacgctagaggtggtaaaattggtttattcggtggtgccggtgtcggtaaaactgtctttatccaagaattgattaacaacattgctaaagctcatggtggtttctcagttttcaccggtgttggtgaaagaaccagagaaggtaacgatttataccgtgaaatgaaagaaactggtgttattaacttggaaggtgattctaaggtcgctttagttttcggtcaaatgaatgaaccaccaggtgctagagctcgtgttgctttaactggtttgaccattgctgaatacttcagagatgaagaaggtcaagatgtcttgttattcgttgataacattttcagattcacccaagccggttcagaagtttctgccttattaggtcgtattccatctgctgtcggttatcaaccaactttagcaactgatatgggtttgttacaagaacgtattaccaccacacaaaaaggttcagttacttctgtccaagctgtttatgtcccagctgatgatttaacagatcctgctccagctaccactttcgcccatttggatgctactactgtcttgtctcgtggtatttcagaattaggtatttacccagctgtcgatccattagattctaaatcaagattattagatgcttcagttgttggtcaagaacattatgatgttgctaccaacgttcaacaaactttacaagcttacaaatctttacaagatattattgctattttaggtatggatgaattgtctgaacaagataaattgactgtcgaaagagcaagaaaaatccaaagattcttatctcaaccatttgctgttgccgaagttttcactggtatyccaggtagattggttagattaaaagacactatcaaatcattcaaagatgttttggaaggtaaatatgatcacttaccag

SEQ ID NO: 489 - DNA, 1291 bp, Pichia anomala
  ref <308>: DATABASE ACCESSION NUMBER: ATCC 2149
ccaattcgaacaaggtaacttaccagctatcttgaatgctttagaaatcaaaaccccaagtggtactccattagttttagaagttgctcaacatttaggtgaaaacactgtcagaactattgctatggatggtactgaaggtttagtccgtggtgaacaagttactgatactggttctccaatcactgtcccagttggtcgtgaaactttaggtcgtattatcaacgttgttggtgaaccaattgatgaacgtggtccaattaacaccaaacaaagaaacccaattcacgctgaaccaccttcattcagtgaacaatcaactgctgctgaagttttagaaactggaatcaaagttgttgatttattagctccatacgctagaggtggtaaaattggtttattcggtggtgccggtgtcggtaaaactgtctttatccaagaattgattaacaacattgctaaagctcatggtggtttctcagttttcaccggtgttggtgaaagaaccagagaaggtaacgatttataccgtgaaatgaaagaaactggtgttattaacttggaaggtgattctaaggtcgctttagttttcggtcaaatgaatgaaccaccaggtgctagagctcgtgttgctttaactggtttgaccattgctgaatacttcagagatgaagaaggtcaagatgtcttgttattcgttgataacattttcagattcacccaagccggttcagaagtttctgccttattaggtcgtattccatctgctgtcggttatcaaccaactttagcaactgatatgggtttgttacaagaacgtattaccaccacacaaaaaggttcagttacttctgtccaagctgtttatgtcccagctgatgatttaacagatcctgctccagctaccactttcgcccatttggatgctactactgtcttgtctcgtggtatttcagaattaggtatttacccagctgtcgatccattagattctaaatcaagattattagatgcttcagttgttggtcaagaacattatgatgttgctaccaacgttcaacaaactttacaagcttacaaatctttacaagatattattgctattttaggtatggatgaattgtctgaacaagataaattgactgtcgaaagagcaagaaaaatccaaagattcttatctcaaccatttgctgttgccgaagttttcactggtatcccaggtagattggttagattaaaagacactatcaaatcattcaaagatgttttggaaggtaaatatgatcactta

SEQ ID NO: 490 - DNA, 508 bp, Rhodotorula minuta
  ref <308>: DATABASE ACCESSION NUMBER: ATCC 10658
cgtattgattcgtgagtggccgttcccttacagcaagcttataaaggagcgaaaaagatctgacattcggcttatgtgctatacagaggaactcatcaacaacgtcgccaaggctcatggtggttactctgtcttcaccggtgtcggagagcgaacacgtgaaggtaacgatctctaccacgaaatgattgaaaccggtgtcattcagctcaagaacgacaagtccaaggccgctctggtcttcggacagatgaacgagccccccggagctcgtgcccgtgtcgctctgaccggtctcaccatcgccgagtacttccgtgacgtcgaaggacaggatgtgctactcttcatcgacaacattttccgattcacccaggccggttcagaggtatctgccctgctcggacgtatcccatctgctgtcggataccagcccacactctcaaccgatatgggtggtatgcaagagcgaatcacaaccaccaagaagggttcgattacctccgtc

SEQ ID NO: 491 - DNA, 686 bp, Rhodotorula mucilaginosa
  ref <308>: DATABASE ACCESSION NUMBER: ATCC 66034
tgtcctcattcaggagctcatcaacaacatcgccaaggcccacggtggttactcggtcttcaccggtgtcggcgagcgtacccgtgagggtaacggtgagtctcccccttcaaacttttggccggctagttggcgcagcgcaaactgacgcgcgcgccctgtccagacttgtaccacgagatgatcgagactggtgtcatccagctcgagaacgacaactcgaagtgcgctctcgtgttcggccagatgaacgagccccctggtgcccgtgcccgtgtcgctctcactgggttcgtcctttctctctctcgagcgtcctggcttgatacggaacgctgacacgtcacgcagtctcactattgctgagtacttccgtgacgaggagggccaggacgtgctcctcttcatcgacaacatcttccgtttcacccagggtgagccgcctccgcgggcattctcccgtttctttcgcgctgacgtctgtcccgtatagccggttcggaggtgtctgcccttctcggacgtatcccgtccgctgtcggataccagccgactctctcgaccgacatgggtcagatgcaggagcgtatcacgtaagtttggccgcagctccgtccgcggcgccctttgtgtctgaccgtgttccaccgctcagcaccaccaagaagggctcgatcacctgtgtc

SEQ ID NO: 492 - DNA, 625 bp, Sporobolomyces salmonicolor
  ref <308>: DATABASE ACCESSION NUMBER: ATCC 32311
tgtcttgattcaggagctcatcaacaacgtcgccaaggcgcacggtggttactccgttttcaccggtgtcggtgagcgtacccgtgagggtaacggtgagcacactttcgccgacctggccattccggaacgtgcggactgacgaggaccacctcgaacagatctctaccacgagatgatcgagaccggtgtcattcagctcgacaacgacaagtcgaagactgctctcgtcttcggccagatgaacgagccccctggcgcccgtgcccgtgtcgctcttactggtctcaccatcgcggagtacttccgtgacgacgagggccaggacgtgcttctcttcatcgacaacatcttccgtttcacccagggtacgttcgatcccgcccgtccaacacgaatgtcgtggtgactgacaacctgttgcgcgtgcagccggttcggaggtgtctgcccttctcggtcgtatcccgtccgctgtcggataccagcccactctctcgaccgacatgggtggcatgcaggagcgtatcacgtacgccctcttctgctttctctcgtttcgctctgcatcgctcacgcatgttcgcccgacagcaccaccaagaagggttcgatcacctgtgtc

SEQ ID NO: 493 - DNA, 1211 bp, Sporothrix schenckii
  strain WSA-148
tctcgtccgtggtgctaaggccactgacactggttcccccattaccatccccgtcggccccggtaccctcggtcgcatcatgaacgtcaccggtgacccgatcgacgagcgcggtcccatcaagaccgacaagttccgtcccatccacgctgaggctcccgagttcgttgaccagtcgaccaccgctgaggttctcgtgactggtatcaaggtcgtcgatctgcttgctccctacgcccgtggtggtaagattggtctgtttggcggtgccggtgttggcaagaccgtgttcatccaggagctcatcaacaacatcgccaaggcccacggtggttactccgtcttcaccggtgtcggcgagcgtacccgtgagggtaacgatctgtaccacgaaatgcaggagacctctgtcattcagcttgacggtgactccaaggtcgccctggtgttcggtcagatgaacgagccccctggtgctcgtgcccgtgtcgccttgaccggtttgactgtcgctgagtacttccgtgacgaggagggccaggatggtatgttttgaattatttccttgtcgtacagttccaaatcgaagaattactaacttgtcagtgcttctcttcatcgacaacattttccgcttcacccaggccggttctgaggtgtctgcccttctgggtcgtattccctccgctgtcggttaccagcccacgctcgccgtggacatgggtctgatgcaggagcgtattaccaccacccgcaagggctcaattacctccgtccaggccgtctacgtgcccgctgacgatctgacggatcccgcccccgccaccaccttcgcccatctggacgccaccactgtgctgtcccgaggtatctctgagctgggtatctaccccgctgtcgaccccctcgactccaagtcgcgtatgctggacccccgtattgtcggtgacgaccactacgagaccgccactcgcgtccagcagatcctccaagagtacaagtcgctgcaggacatcatcgccattctgggtatggacgagctgtctgaggccgacaagcttacagtcgagcgtgctcgtaagatccagcgtttcctgagccagccgttcacggtcgcgcaggtcttcactggtatcgaaggccagctggtcgatctgaaggacactatcgcttcgttcaaggctatcctgagcggtgagggtgacagcctt

SEQ ID NO: 494 - DNA, 1133 bp, Stephanoascus ciferrii
  ref <308>: DATABASE ACCESSION NUMBER: ATCC 52550
tcttgttagaggcaccccagtcaaggacactggtgctccaattaccattccagttggtaacggcactttgggccgtatcgtcaacgttctcggtgagccaattgatgagcgtggaccagtcaaggctgacaagttcagacctattcacgctgagccaccaaccttcgctgaccagtccacctctgccgaggttcttgagaccggtattaaggttgtcgacttgcttgccccttatgccagaggtggtaagattggtcttttcggtggtgccggtgtcggtaagactgtgttcattcaggagcttattaacaacattgctaaggcccacggtggttactctgtcttcactggtgtcggtgagcgaactcgtgaaggtaacgatttgtaccacgaaatgatggagaccggtgtcatcaaccttgagggtgactccaaggtgtctcttgtgttcggtcagatgaacgagcctccaggagcccgtgcccgtgttgccttgaccggtttgaccattgccgagtacttcagagatgaggagggccaggatgtcttgttgttcattgacaacattttccgattcacccaggccggttctgaggtctctgccttgttgggtcgtatcccatctgccgtcggttaccaaccaaccttggctactgatatgggtggtcttcaagaacgtattaccaccactcaaaagggttccgtcacctctgtccaggctgtctacgtcccagctgacgatttgactgatcctgccccagctaccaccttcgcccatttggacgccaccaccgaattgtcccgatctatctctgagttgggtatctacccagctgtcgaccctcttggttccaagtcccgtcttttggatgcctccgtcgtcggccaagagcactacgacgttgccgccaacgtccaacagaccttgcaggcctacaagtctctccaggatatcattgccattttgggtatggacgaattgtctgaggctgataagctcactgtcgagcgtgctcgtaagatgcagagattcctttctcagccattcaccgtcgctgaggtcttcactggtctcgagggtagactcgtttctttgaaggacaccatccgatccttcaaggagatccttgacg

SEQ ID NO: 495 - DNA, 608 bp, Trichophyton mentagrophytes
  strain WSA-225
ggagttgattgtaagtcatttgaaacccagccccaagaaacagaagctaggcgaaaattggacaattgagcaatttagccattggagaaaagaaatttcgagtattaattgtttttatagaacaacattgccaaggctcacggtggttactctgtcttcactggtgtcggagagcgtacccgtgaaggaaacgatctctaccatgaaatgcaggagacccgtgtcattcagcttgatggcgagtccaaggtcgccctggtcttcggccagatgaacgagcccccaggtgcccgtgcccgtgttgctcttactggtttgaccattgctgagtacttccgtgatgaggaaggtcaagacggtgagtttcttatggataaaaaaaaatttttttttttttttttttttttcaagaaattcatgttctaacaaagtgtattctagtgcttctcttcatcgacaacattttccgtttcactcaggctggttccgaagtgtctgccctgcttggtcgtatcccatctgccgtcggttaccaacccactcttgccgtcgacatgggtggtatgcaggaacgtattaccaccaccaagaagggatccattacctcc

SEQ ID NO: 496 - DNA, 794 bp, Wangiella dermatitidis
  strain WSA-229
gtttattcaagaactcattgtgggtggcattctcataatgtttcggccacaattactgattgaaaatagaacaacattgcaaaggctcatggtggttactccgtgttcactggtgtcggcgagcgaactcgtgagggtaacgacttgtaccacgaaatgcaggagacctctgtcattcagctcgatggcgagtccaaggtcgcgctggtgtttggtcaaatgaacgaacctcctggtgctcgtgctcgtgttgctctgactgggtaagttgttccttcgcttcttgcgcgtatccacatccccatcttgagaatacgtctgccaccatgtcatgtgatgttgggctggttctggtttttgggaggccctcaagttcaatttttggatgacagcaccagctttacaagattatgctaacttaatggagtcttacggtggctgagttcttcagggatgaggagggacaggatggtaagtttgataacaatctcgtcggtgtcaatatcgacggcgtactcttcgcatcaaaaaaccaaagaggtggtttggtgtgagaagtgcgccggaaataatggcaaccacgtgacaatgaccacgtgtggggctcccgtgctaacacgtgacagtcttgctcttcatcgacaacattttccgattcactcaasccggttctgargtgtctgccttgcttggtcgtattccatctgccgtcggttaccaacccacactcgccgtcgacatgggtctcatgcaggaacgtatcaccaccacccggaagggatccatcacatctg

SEQ ID NO: 497 - DNA, 1148 bp, Yarrowia lipolytica
  ref <308>: DATABASE ACCESSION NUMBER: ATCC 38295
tcttgtccgaggcaccgccgtcgctgacaccggtgctcccatcactatccccgtcggccgaggtacccttggtcgaatcatcaacgtctgtggtgagcccattgacgagcgaggacccatcgaggcttccaagtacctccccatccacgctgacccccctaccttcgctgagcagtctacctccgctgaggttctcgagaccggtattaaggtcgtcgacctcctcgccccttacgcccgaggtggtaagattggtctcttcggtggtgccggtgtcggtaagactgtcttcatccaggagctgattaacaacattgccaaggcccatggtggtttctccgttttctgcggtgtcggtgagcgaacccgagagggtaacgatctttaccgagagatgaaggagactggtgtcatcaacctcgagggtgagtctaaggtcaccctcgtcttcggtcagatgaacgagcctcccggagcccgtgcccgagtcgcccttactggtctgaccattgccgagtacttccgagacgaggagggtcaggatgtgttgctcttcgttgacaacattttccgattcacccaggccggttccgaggtgtccgctctgcttggtcgaattccctccgctgtcggttaccagcccactctggccaccgatatgggtgccctccaggagcgaattaccaccacccagaagggttccgtcacttccgtccaggccgtctacgtgcctgccgatgatttgaccgatcctgctcccgccaccaccttcgcccatcttgacgccaccaccgtcctgtcccgaggtatttccgagctgggtatctaccccgctgtcgatccccttgattccaagtctcgacttctggatatcgatgttgtcggaaaggagcactacgatgttgcttccaacgtccagcagaccctccaggcttacaagtctctccaggatatcattgccattcttggtatggatgagctgtccgagcaggacaagctgaccgtcgagcgagctcgaaagatccagcgattcctgtctcagcccttcaccgtcgccgaggttttcaccggtattgagggacgacttgtctctctcaaggacactgtccgatccttcaaggagatccttgacggtaagcacgatgctc

SEQ ID NO: 498 - DNA, 966 bp, Aspergillus fumigatus
  strain WSA-172
gcgctattgtcgttgttgctgcctccgacggtcagatgtaggtggaacatcttgggaaatacgtcgtaaaacacgtcgcttacgttttcgcgaataggccccagactcgtgagcatttgctgctcgcccgccaggttggtgtccagaagatcgttgtcttcgtcaacaaaatcgatgctattgatgatccggagatgctggaactggtcgaactcgagatgcgtgagctgctgaacagctacggtttcgagggtgaagagactccgatcattttcggttccgctctctgtgctctcgaaggacgccgtgacgacatcggtaaagacagaattgagcagcttatgaacgctgtcgacacctggatccccactcctcagcgtgacctcgacaaacctttcttgatgtctgtcgaggaagtgttctctatcgccggccgtggtaccgtggcttctggtcgtgtcgagcgtggtatcttgaagaaggactctgaggttgagattgttggaggctccttcgaacccaagaagaccaaagtcaccgacattgaaaccttcaagaagagctgtgatgaatcgcgtgctggtgacaactctggtctcctcctgcgtggtatccgacgtgaagacgtcaagcgtggtatggtcattgctgttcccggcagcaccaaggctcacgacaagttcctcgtctccatgtacgtcctgaccgaggcggagggtggtcgtcgtactggcttcggtgccaactaccgtccccaagtcttcatccgtactgcaggtaagttcccgcacaccgtgtccagatcttccgagagattagcgatatatgctaatgattcatcagacgaggctgctgacctcagcttccctgacggcgaccaatctcgcagagttatgcctggtgacaacgtcgagatgatcctgaagacccaccaccctgttgctgctgaggctggtcaacgcttca

SEQ ID NO: 499 - DNA, 846 bp, Blastoschizomyces capitatus
  ref <308>: DATABASE ACCESSION NUMBER: ATCC 10663
tggtgctattattgttgttgctgcttctgatggtcaaatgccccaaacccgtgagcacttgcttcttgctcgtcaagttggtgttaagcacattgttgttttcgttaacaagattgatactattgatgatcctgaaatgttggaacttgtcgaaatggaaatgagagaacttctttcttcttacggttttgatggcgataacacccctgtcattatgggttctgctctctgtgctcttgaaggtcgtgaaccagaaattggtgaacaaagaatcaaccaactccttgatgctatcgatgaatacattcctaccccagttcgtgatatggaccaacctttcttgatgccacttgaaggtgttttctctattccaggtcgtggtactgttgccactggacgtgtctatcgtggtactttgaagagaggtgaagaagttgaagttgttggctacaatgatgctccaatcaagaccaccgttactggtattgaaatgttcaagaaggaacttgatcaagctcaagctggtgacaacgctggtattcttttgagaggtgttaagcgtgaagaccttaagcgtggtatggttgttgctaaaccaggtaccgttaagccacacaccaagttccttgcctccatctatgttttgactaaggaagaaggtggcagacactctggctttggtcttaactacagacctcaacttttccttggttctgctgatgttaccactgtcttgaccttcccagagggtgttgaccaaagcactcaagtcatgccaggtgacaacactgaaatggtttgcgaacttgttcacccagttgctgtcgaacaaggccaacgtttcaa

SEQ ID NO: 500 - DNA, 846 bp, Candida rugosa
  ref <308>: DATABASE ACCESSION NUMBER: ATCC 96275
ggtgccattattgttgttgctgcctctgatggacagatgccccagacccgtgagcatcttttgcttgcccgccaagtcggtatgcaaaaggtcgttgtgtttgttaacaagattgataccattgatgaccctgaaatgcttgatcttgtcgagatggagatgcgtgaactgttgaatgaatatgacttcgatggagataactctcctgtcattatgggctctgctcttgctgctcttgaggacaagaaccccgagattggtaaggaccgtatcatgcagctcttggacgctgttgatgaatggatccctacccccgagcgtgaccttgacaagcctttcatgatgcctattgaggcctctttctccatttctggtcgtggtactgttgccactggccgtgtcgagcgtggtattctcaagaagggtgaggaagtcgagatcgttggtttcaacaagcagcccctgaaatctgttgttactggtattgaaatgttcaagaaggaacttgatcaggcccagggcggtgataatgctggtatcttgcttcgtggtattcgtcgtgaggacttgcagcgtggtatggttttggccaagcctggaactgttaaggctcacaccaagttcctttcctccatctacgttctctccaaggaagagggcggccgtcactctcctttcggtatgaactatcgtccccagatgttcgtttctgcagctgatgtcaccgttactcttactttccctgagggtgttgaacagcacactcaggtcttccctggtgagaacaccgagatggttggcgagctcgttcaccctactgctattgaggttggtcaacgcttcaac

SEQ ID NO: 501 - DNA, 944 bp, Coccidioides immitis
  strain Silveira
agttgtcgtcgttgctgcttcagacggtcaaatgtatgcaaccgagagcactcccggatcttggtttaaatggcactaatataagacaggcctcaaactcgagagcatttacttctcgcccgtcagatcggtatccaaaaaatcgtcgtcttcgtgaacaaggttgatgccatcgaggacaaagagatgttggagcttgttgaattggagatgcgtgaactcctaaccagctacggtttcgagggtgaagaaactcccatcatttttggctctgctctctgtgccctcgaaggaagacaacccgagatcggtgttaccaagattgatgagctcttgcaggccgtcgacacctggattcccactcctcagcgtgagactgacaagcccttcttgatgtccattgaggaagtgttctctatttccggacgaggaaccgttgtctccggccgtgtggagcgtggtatcctcaagaaggactccgaagttgaaattgtcggcggttcgcccgagccaatcaaaaccaaggttaccgatatcgaaacctttaagaagtcttgcgacgagtctcgcgctggtgataactccggcttgctcctacgaggcgttaagcgtgaagatattagccgtggcatggtcgtcgctgtaccaggaagtgtcaaggcccatactgaattcttagtttcgctttacgtcctcaccgaagctgagggtgggcgcaaatctggattcagcagcaagtaccgcccacagatgttcattcgcactgccggtatgtaatactgtgataatttcgttgacatggtactgattgaattctatagacgaagcggctcagctcagctggcccggagaagatcaagacaagatggctatgccaggagacaatatcgaaatgatttgcaccaccttgcacccagttgccgccgaggctggccagcgattca

SEQ ID NO: 502 - DNA, 849 bp, Fusarium oxysporum
  strain WSA-212
gctatcatcgtcgttgctgcctccgatggacagatgccccagacccgtgaacacttgctcctcgctcgtcaggtcggtgtccagcgaattgtcgtcttcgtcaacaaggtcgatgccattgatgaccccgagatgcttgagctcgtcgagatggagatgcgcgagcttcttaacacctacggcttcgaaggcgacgacactcccgtcatcatgggctctgctcttatgtctctccagaaccagcgccccgagattggcaccgagaagatcgatgagctccttgctgccgtcgacgagtggatcccaacccccgagcgtgaccttgacaagcccttccttatgtccgtcgaggatgtcttctccattgccggccgtggtaccgtcgtgtctggccgtgtggagcgtggtattctgaagcgtgatcaggagatcgagcttgtcggaaaggggcaggaggttatcaagaccaaggttaccgacattgagaccttcaagaagtcttgtgagcagtcccaggctggtgacaactctggtctcctcatccgaggtgttcgccgtgaggatgtccgccgtggtatggttgtctgcgctcctggcaccgtcaagtctcatacccagtttctcgcttccctctacgtcctcaccaaggaggagggtggccgacacaccggtttccaggagcactaccgaccccagctctatctccgaactgcagatgagtccattgacctgactttccccgagggtactgaggatgcctccagtaagatggtcatgcctggtgacaacaccgagatggttgtcaccatgggtcaccccaatgccatcgaggttggtcagcgattcaac

SEQ ID NO: 503 - DNA, 1064 bp, Histoplasma capsulatum
  strain G186A5
tggtgctattgtcgttgttgctgctgctgacggccaaatgtaagacgccgcgagggactgctgagggttttatgctttttaggcccccttgtttctgagagcatgatgatactaatattcggaaacgtatctattaggcctcaaacacgtgagcatttgctccttgcccgacaggtcggtgtccaaaagatcgtcgttttcgtgaacaaagtcgacgcccttgaggacaaggagatgttggagcttgtcgagttagaaatgagagagctcttaaacacctacggcttcgagggtgaagagacacccatcatctttggttctgccctttgcgccatggaaggccgtgagcctgagttgggagaaaagaaaattgatgaattgctggaggctgttgatacttggatccccacaccacaacgtgataccgaaaaacctttcttgatgtccgttgaggaagtattctctatctccggccgtggaaccgttgcctccggtcgtgttgagcgcggtgtcctcaagaaggattcagaagtcgagctaattgggggcggctccacccccatcaggacgaaggtaactgatatcgaaactttcaagaaatcctgtgacgagtctagagctggggacaactccggtcttttattgcgtggtatcaagcgtgaagatatccgccgtggtatggtagttgccgttcctggcagcgtcaaggcccacgacaagttcttggtgtcgatgtatgtcctgaccgaagctgagggtggtcgccgaaccggattcggccagaactatcgtcctcaaatgttcatccgcacagctggtatgtcaaaatgggaccccttttcataatcctttctttttttccttttcctctctatctctctttctgtttcctttcaactcgcctgattcacgaaattaactaacccgtttgattatagacgaagccgcccatctcagcttccctagtggagcagatgaaagcaaactcgttatgcctggtgacaacgtcgagatgatcctccagacacaccgccccgtggctgctgaggccggccagcgattca

SEQ ID NO: 504 - DNA, 982 bp, Paracoccidioides brasiliensis
  ref <308>: DATABASE ACCESSION NUMBER: ATCC 32071
tggtgctatcgtcgttgttgctgcctctgacggccaaatgtagggattttgcaagactggtgaaaaaatctaaagaaaatagaaaagattgtgctgatgtttggtatcaggccccaaacacgcgagcatctgcttcttgccagacaagtcggtgttcagaaaatcgttgttttcgtcaacaaggtcgatgctgtagaggataaggagatgttggagcttgtcgaattggagatgagagagctcttgaccacctatgggttcgagggtgagaagacacctatcatctttggttctgcgctctgtgctatggagggccgtcagcccgagttgggagagcagaaaattgatgaattactcgaggctgtggatacttggatccctacgccacagcgtgatactgacaagcccttcctgatgtccattgaggaggtgttctctatctctggacgaggaaccgttgcctccggccgcgttgagcgtggtatcctcaagaaggactccgaagttgaaattattggcggcggtgttcccacaatcctgaccaaggtgactgatatcgaaaccttcaagaagtcttgcgacgagtccagagccggggacaactccggcctcttgttgcgcggtgtcaagcgtgaggatatccgccgtggtatggtcgttgcagttcccggaagcgtcaaagcacatgacagattcttggtgtcgatgtacgttctgaccgaggctgagggtggtcgccgcactggcttcggtcagaactatcgtcctcaaatgttcatccgcacagctggtacgttcattctttcactatattcctatatgcatagcccgatcctcccattaactaattgacacagacgaggctgctgaactcagctggcctgatggagacgacgaagccaaaatggtcatgcccggtgacaatgttgaaatggtcctgaagtcacaccgcccggggccgctgaggctggacagcgattca

SEQ ID NO: 505 - DNA, 931 bp, Penicillium marneffei
  ref <308>: DATABASE ACCESSION NUMBER: ATCC 58950
cgctgttgttgtcgtcgctgcttctgatggtcaaatgtaacatatccacgagctgccaattatggacactgctgataagaataggccccaaacccgtgagcacttgctcctcgcccgtcaggtcggtgttcaaaagatcgtcgtcttcgtcaacaaggttgatgccgtcgaggaccccgagatgttggaacttgtcgaattggaaatgcgtgaactcttgaccacctacggtttcgagggtgaagagacccctatcattttcggatccgctctttgcgccttggaaggccgcaagcccgagattggcgaacagaagattgacgagctcatgaacgccgttgatacctggatccccaccccccagcgtgaccttgacaagcccttcttgatgtccgttgaggaagttttctccatctctggtcgtggtaccgttgcatctggtcgtgttgagcgtggtattttgcgcaaggattctgaggttgagattatcggataccagaagaaccctatcaagaccaaggttaccgacattgagaccttcaagaagtcttgcgatgaatctcgtgctggtgacaactctggcttgcttctccgtggtatcaagcgtgaggacattcgtcgtggtatggttatcgctgctcctggaaccaccaaggctcatgacaacttcttggtctccatgtatgtcttgactgaggctgaaggtggtcgtcgtactggattcggcgccaactaccgtcctcaagctttcatccgtactgccggtatgttccctttcaaagtcaattaatgagcgatttgctaacgagttatagatgaggctgctactctcagcttccccggtgacgatcagtccaagcaggtcatgcccggtgacaacgttgagatgatcttgaagacacaccgtcccgttgccgccgaagctggtcag

SEQ ID NO: 506 - DNA, 846 bp, Pichia anomala
  misc_feature (1)...(846): n=a,t,c or g
  ref <308>: DATABASE ACCESSION NUMBER: ATCC 18205
tggtgctattattgttgttgctgcttctgatggtcaaatgcctcaaaccagagaacatttrttattggctagacaagttggtgttcaacacattgttgtctttgttaacaaagttgatactattgatgacccagaaatgttggaattagttgaaatggaaatgagagaattgttaagtacttatggttttgatggtgataacgtcccagttgttatgggttctgctttatgtgccttggaaggtcgtgaagaagaaattggtgtcaaagctattgataaattattagctgctgttgatgaatatatcccaaccccacaaagagatttagaaaaaccattcttgatgggtgttgaagatgtcttytcaatctcaggtagaggtaccgttgttactggtcgtgttgaacgtggtaacttgaagaaaggtgatgaagttgaaattgttggtttaaacaaaactccattgaaaactactgtyacnggtattgaaatgttcaaaaaagaattggaccaagctatggctggtgataactgtggtatcttattacgtggtatcaaaagagatgacatyaaaagaggtatggttattgctaaaaccggtaccatctcwgctcacactaaattcttagcctcaatgtatattttgactaaagaagaaggtggtcgtcactcaggttttggtgaacattacagacctcaattattcatcagaactggtgatgttaccgttgttttaaccttyccagaaggtggtgattcatctcaacaaatcttaccaggtgacaatgtcgaaatggtttgtgaattggttcacccaactgctttagaagctggtcaaagattcaa

SEQ ID NO: 507 - DNA, 964 bp, Trichophyton mentagrophytes
  strain WSA-225
ggagctgttgtcgttgtcgcagcttctgacggtcaaatgtaattgaatgcccgcccagacggatgaaaggatttgacgtttctaacatcagtctaggcctcagaccagagaacatttgctccttgcccgccaggtcggtgtccagaagctggtcgttttcgttaacaaggtcgatgccgttgaggacccagagatgttggagcttgtcgaacttgaaatgcgtgaactcctcagccactacagttttgagggtgaggagacccccatcatttttggctctgctctctgtgccctcgagtcccgtcgacctgagcttggtgtcgagaagattgacgagctattgaacgccgtcgacacctggatccccacccccgagcgcgccactgataagcctttcctcatgtccattgaggaagtgttctctatctctggtcgtggtaccgtcgtctccggtcgtgttgagcgtggtatcctcaagaaggattccgacgtcgaaattgttggtggctctaccacccctatcaagaccaaggtcacagatatcgaaaccttcaagaagtcctgcgatgaatctcgagctggtgacaactctggtctccttctccgaggtatcaagcgtgaggacttgaagcgtggaatggttgttgctgcccccggatccaccaaggctcacaccgacttcatggtctccctctacgtcctgactgaggctgagggtggtcgttccaacggcttcacccacaagtaccgccctcaaatgttcatccgtactgctggtatgtaaccaaagtttccgctatttactaagtagatcattgctaacttgtattcccttccgtagacgaagccgcatctttcagctggcctggagaagaccaagacaagaaggctatgcctggtgacaacgtcgagatgatttgcaaaaccctccaccccattgctgccgaggctggccaacgattca

SEQ ID NO: 508 - DNA, 844 bp, Yarrowia lipolytica
  ref <308>: DATABASE ACCESSION NUMBER: ATCC 38295
ggtgctatcattgtcgttgctgctggagacggttccaagccccagacccgagagcatctgctgcttgctcgacaggtcggtgtccagaacctggttgtgtttgttaacaaggttgatcagattgatgataaggagattcttgagctcgttgacatggagatgcgagatctgctgacccagtacggttttgatggtgacaacacccccgttgtcatgggctctgctctgtgcgctcttgagggcaagcagaaggatattggagaggacgccatcatggcccttatggatgccgttgatgagcacatccctacccctaaccgtgaccttgagaagcccttcctgatgcccgttgaggacgttttctccatctctggccgaggaactgttgttactggccgagtcgagcgaggaaacctgaagaagggtgaggaaatcgagattgttggctacaacaacaagcccatcaaggctgttgttaccggtattgagatgttcaagaaggagctcgagtccgccatggccggtgacaacgccggtatcctgctccgaggtatcaagcgagacgagatcaagcgaggtatggtcatgtgcaagcctggcaccgtcaacgcccacaccaagttccttgcttctctttacatcatccccaccgaggagggtggtcgaaccagctctttcggcgccaactaccgaccccagatgttcatccgaacttcttccgtcaccgccactctcaccttccccgagggtaccgacgagtcccagaccgtcaaccccggtgacaacactgagatggttctcgagcttgttcaccctaccgccattgaggtcaaccagcgattca

SEQ ID NO: 509 - DNA, 1067 bp, Babesia bigemina
  strain Suarez-2
cttggacaagctgaagagcgagcgtgagcgtggtatcaccattgacattaccctgtggaagttcgaaactggcaagtactactacaccgtcattgacgcccccggtcaccgtgacttcattaagaacatgattacgggtacctcccaggccgatgttgctatgcttgtcgtgcccgccgaggctggtggtttcgaagctgccttctctaaggaaggtcagacccgtgagcacgctcttttggccttcacccttggtgtcaagcagatcatttgcgccatcaacaagatggacaagtgcgactacaaggaggaccgttacagcgaaatccagaaggaagttcagggttacctgaagaaggtcggttacaacatcgagaaggtgcctttcgtcgccatctccggtttcatgggtgacaacatggttgagcgctccaccaacatgccgtggtacaagggcaagaccttggtcgaggccctcgacatgatggagcccccgaagaggcccgtcgacaagcccctgcgtcttcccctccagggtgtgtacaagatcggtggtatcggtaccgtccctgtcggtcgtgtggagactggtcagctcaaggccggtatggtcctcaccttcgcccccaacccgatcactactgagtgcaaatccgtcgaaatgcaccacgaagttatcgatgttgccagccctggtgacaacgttggtttcaacgtgaagaacgtgtccacctctgacatccgcactggtcacgtcgcttctgactccaagaacgaccccgccaaggccgccgtgtccttcaccgcccaggtcatcatcttgaaccaccctggtaccatcaaggccggttactcccctgtggttgactgccacactgcccacatctcgtgcaaattcgacgagatcaccagccgtatggacaagcgtaccggtaaggcccttgaggagaaccccaagaccatcaagaacggcgacgccgctatggtcgtcctgaagccgtgcaagcccatggtcgtcgaggccttcactgaatacgctccccttggtcgtttcgccgtgcgtgacg

SEQ ID NO: 510 - DNA, 1049 bp, Babesia bovis
  strain Suarez-3
gtgaacgtgaacgtggtattactattgatattaccttatggaagttcgagaccaccaagtactactacaccgtcattgatgcccctggtcaccgtgacttcatcaagaacatgattacgggtacttctcaagccgatgttgctatgcttgttgtaccagctgaggctggtggtttcgaggccgctttctccaaggaaggacagacccgtgagcacgctcttttggctttcacccttggtgtcaaacagatcatctgtgccattaacaagatggacaagtgcgactacaaggaggaccgttacagtgaaatccagaaggaagtccagggttacctcaagaaggtcggttacaatattgagaaggtgcccttcgttgccatctccggtttcatgggagacaacatggttgagcgttccaccaacatgccctggtataagggaaagacattggtcgaggcccttgatcagatggaacccccaaagaggcccgttgacaagccacttcgtcttcccctccagggtgtctacaagatcggtggtatcggtaccgtccccgtcggtcgtgttgaaactggtatgttgaaggctggtatgattctaacctttgctcctaacccaatcaccactgaatgcaaatccgttgaaatgcaccacgaaaccgttgaggttgcttaccccggtgacaacgtcggtttcaacgtaaagaacgtttctacttctgacattcgcagtggtcacgttgcctctgattctaagaacgaccctgccaaggctgctgtttccttcactgcccaggtcattgtgctcaaccaccctggtaccattaaggccggttactgccccgtcgtcgattgccacaccgctcacatttcatgtaaattcgaagagatcaccagccgtatggacaagcgtaccggtaaatctcttgaggaaaaccccaagaccatcaagaacggtgacgctgccatggttgtgctcaagccaatgaagcccatggttgtcgaatccttcactgagtatgctcctcttggtcgtttcgctgttcgtgac

SEQ ID NO: 511 - DNA, 1070 bp, Crithidia fasciculata
  ref <308>: DATABASE ACCESSION NUMBER: ATCC 11745
tggacaagctgaaggcggagcgcgagcgcggtatcacgatcgatattgccctgtggaagttcgagtcgcccaagtccgtgttcacgatcatcgatgcccccggccaccgcgacttcatcaagaacatgatcaccggcacctcccaggccgatgccgccattctgatgattgactcgacccagggtggcttcgaggctggcatctccaaggacggccagacccgcgagcacgccctgcttgccttcacgctgggcgtgaagcagatggttgtgtgctgcaacaagatggacgacaagacggtgcagtacgcccaggcccgctacgaggagatcagcaaggaggtcggcgcgtacctgaagcgcgtgggctacaacccggagaaggtgcgcttcatcccgatctcgggctggcagggcgacaacatgatcgagaagtccgacaacatgtcgtggtacaagggtcccacgctgctggaggcgctcgacctgctggaggcccccgtgcgtccggtggacaagccgctgcgcctgcccctgcaggacgtgtacaagatcggcggtatcggcactgtgcccgtgggccgtgtggagaccggcgtgatgaagccgggcgacgttgtggtgttcgcgcctgccaacgtgacgaccgaggtgaagtcgatcgagatgcaccacgagcagctggctgaggccgtgcccggcgacaacgtgggcttcaacgtgaagaacgtgtccgtgaaggatatccgccgtggtaacgtgtgcggcaacacgaagagcgaccccccgaaggaggcggccgacttcactgcccaggtgatcgtgctgaaccaccccggccagatcagcaacggctacgcgccggtgctggactgccacacgagccacatcgcgtgcaagttcgcggacatcgagtccaagatcgaccgccgctctggcaaggagctggagaagagcccgaaggccatcaagtccggcgatgcggccatcgtgaagatgatcccgcagaagccgatgtgcgtggaggtgttcaacgactacccgccgctgggccgcttcgctgtccgcgat

SEQ ID NO: 512 - DNA, 1052 bp, Entamoeba histolytica
  strain HM1-IMMS
gctgaaagagaaagaggaattactattgatatttcattatggaaattcgaaacatctaaatactacttcactattattgatgccccaggtcayagagatttcattaagaacatgattactggaacttcacaagctgatgttgccatccttattgttgctgctggtactggwgaatttgaagctggtatttcaaagaatggacaaaccagagaacayattcttctttcatacactcttggagttaaacaaatgattgttggwgttaacaagatggatgctattcaatataaacaagaaagatatgaagaaattaagaaagaaattagtgcattccttaagaagacwggatataatccagacaagattccatttgtcccaatttcaggattccaaggagataatatgattgaaccatcaaccaacatgccatggtacaaaggaccaacattaattggagcacttgattcagtcacaccaccagaaagaccagttgataaaccacttagacttccacttcaagatgtttayaagatttcaggtattggaactgtaccatgtggaagagttgaaactggagttcttagaccaggaactattgttcaatttgcaccatcaggagtttcatctgaatgtaaatcagttgaaatgcatcacacagcacttgctcaagctattccaggtgataatgttggattcaatgttagaaayttaacagttaaagatattaagagaggaaatgtagcatcagatgctaagaatcaaccagctgttggatgtgaagatttcactgctcaagtcattgtcatgaaccatccaggacaaattagaaagggatatacaccagttcttgattgccatacatcacacattgcatgtaaattcgaagaattattaagcaagattgatagaagaacaggtaaatccatggaaggaggagaaccagaatatattaagaatggagattcagcacttgttaagattgttccaactaaaccactttgtgttgaagaatttgctaaattcccaccattgggaagatttgctgttagaga

SEQ ID NO: 513 - DNA, 1082 bp, Giardia lamblia
  strain Faubert-1
gacgagcgcgagcgcgggatcacgatcaacatcgcgctctggaagttcgagacgaagaagtacatcgtcacgatcatcgacgccccgggccaccgcgacttcatcaagaacatgatcacggggacgtcccaggccgacgtcgcgatcctcgtcgtcgcggcgggccagggcgagttcgaggccgggatctcgaaggacggccagacgcgcgagcacgcgacccttgcgaacacgctcgggatcaagacgatgatcatctgcgtcaacaagatggacgacggccaggtcaagtactcgaaggagcgctacgacgagatcaagggcgagatgatgaagcagctcaagaacatcggctggaagaaggccgaggagttcgactacatcccgacgtccggctggaccggggacaacatcatggagaagtccgacaagatgccctggtacgagggcccgtgcctgatcgacgcgatcgacgggctcaaggccccgaagcgcccgaccgacaagcccctccgcctcccgatccaggacgtctacaagatctcgggcgtcgggaccgtccccgcgggccgcgtcgagacgggcgagctcgcgcccgggatgaaggtcgtcttcgccccgacgtcccaggtctcggaggtcaagtccgtcgagatgcaccacgaggagctcaagaaggccgggcccggggacaacgtcggcttcaacgtccgcgggctcgccgtcaaggacctcaagaagggctacgtcgtcggggacgtgacgaacgacccgcccgtcggctgcaagagcttcaccgcccaggtcatcgtcatgaaccacccgaagaagatccagcccggctacacgcccgtcatcgactgccacaccgcgcacatcgcgtgccagttccagctcttcctccagaagctcgacaagcgcacgctcaagcccgagatggagaacccgcccgacgcaggccgcggcgattgcatcatcgtcaagatggtcccccagaagcccctgtgctgcgagacgttcaacgactacgcgcccctcggccgcttcgccgtccgcgacatgcgccaaaccgttgccgtcgg

SEQ ID NO: 514 - DNA, 1098 bp, Leishmania tropica
  ref <308>: DATABASE ACCESSION NUMBER: ATCC 30816
acgcgtgggtgctcgacaagctgaaggcggagcgcgagcgcggcatcacgatcgacattgcgctgtggaagttcgagtcgcccaagtccgtgttcacgatcatcgatgcgcccggccaccgcgacttcatcaagaacatgatcacgggcacgtcgcaggcggacgccgccatcctgatgatcgactcgacgcatggtggcttcgaggctggcatctcgaaggacggccagacccgcgagcacgcgctgcttgccttcactcttggcgtgaagcagatggtggtgtgctgcaacaagatggacgacaagacggtgacgtacgcgcagtcgcgctacgatgagatcagcaaggaggtgggcgcgtacctgaagcgcgtgggctacaacccggagaaggtgcgcttcatcccgatctcgggctggcagggcgacaacatgatcgagaagtcggacaacatgccgtggtacaagggtcccacgctgctggacgcgctcgacatgctggagccgccggtgcgcccggtggacaagccgctgcgcctgcccctgcaggacgtgtacaagatcggcggtatcgggacggtgcccgtggggcgcgtggagaccggcatcatgaagccgggcgacgtggtgacgttcgcgcccgccaacgtgacgactgaggtgaagtcgatcgagatgcaccacgagcagctggcggaggcgcagcccggcgacaacgtcggcttcaacgtgaagaacgtgtcggtgaaggacatccgccgtggtaacgtgtgcggcaactcgaagaacgacccgccgaaggaggcggccgacttcacggcgcaggtgatcgtgctgaaccaccccggccagatcagcaacggctacgcgccggtgctggactgccacacgagccacattgcgtgccgcttcgcggaaatcgagtccaagatcgaccgccgctccggcaaggagctggagaagaaccccaaggcgatcaagtctggcgatgccgcgatcgtgaagatggtgccgcagaagccgatgtgcgtggaggtgttcaacgactacgcgccgctgggccgctttgccgtgcgcgacatgcgccaaaccgttg

SEQ ID NO: 515 - DNA, 1104 bp, Leishmania aethiopica
  ref <308>: DATABASE ACCESSION NUMBER: ATCC 50119
tacgcgtgggtgctcgacaagctgaaggcggagcgcgagcgcggcatcacgatcgacattgcgctgtggaagttcgagtcgcccaagtccgtgttcacgatcatcgatgcgcccggccaccgcgacttcatcaagaacatgatcacgggcacgtcgcaggcggacgccgccatcctgatgatcgactcgacgcatggtggcttcgaggctggcatctcgaaggacggccagacccgcgagcacgcgctgcttgccttcactcttggcgtgaagcagatggtggtgtgctgcaacaagatggacgacaagacggtgacgtacgcgcagtcgcgctacgaggagatcagcaaggaggtgggcgcgtacctgaagcgcgtgggctacaacccggagaaggtgcgcttcatcccgatctcgggctggcagggcgacaacatgatcgagaagtcggacaacatgccgtggtacaagggtcccacgctgctggacgcgctcgacatgctggagccgccggtgcgcccggtggacaagccgctgcgcctgcccctgcaggacgtgtacaagatcggcggtatcgggacggtgcccgtgggccgcgtggagaccggcatcatgaagccgggcgacgtggtgacgttcgcgcccgccaacgtgacgactgaggtgaagtcgatcgagatgcaccacgagcagctggcggaggcgcagcccggcgacaacgtcggcttcaacgtgaagaacgtgtcggtgaaggacatccgccgtggcaacgtgtgcggcaactcgaagaacgacccgccgaaggaggcggccgacttcacggcgcaggtgatcgtgctgaaccaccccggccagatcagcaacggctacgcgccggtgctggactgccacacgagccacattgcgtgccgcttcgcggaaatcgagtccaagatcgaccgccgctccggcaaggagctggagaagaaccccaaggcgatcaagtctggcgatgccgcgatcgtgaagatggtgccgcagaagccgatgtgcgtggaggtgttcaacgactacgcgccgctgggccgctttgccgtgcgcgacatgcgccaaaccgttgccgtc

SEQ ID NO: 516 - DNA, 1106 bp, Leishmania tropica
  ref <308>: DATABASE ACCESSION NUMBER: ATCC 30815
tacgcgtgggtgctcgacaagctgaaggcggagcgcgagcgcggcatcacgatcgacattgcgctgtggaagttcgagtcgcccaagtccgtgttcacgatcatcgatgcgcccggccaccgcgacttcatcaagaacatgatcacgggcacgtcgcaggcggacgccgccatcctgatgatcgactcgacgcatggtggcttcgaggctggcatctcgaaggacggccagacccgcgagcacgcgctgcttgccttcackcttggcgtgaagcagatggtggtgtgctgcaacaagatggacgacaagacggtgacgtacgcgcagtcgcgctacgatgagatcagcaaggaggtgggcgcgtacctgaagcgcgtgggctacaacccggagaaggtgcgcttcatcccgatctcgggctggcagggcgacaacatgatcgagaagtcggacaacatgccgtggtacaagggtcccacgctgctggacgcgctcgacatgctggagccgccggtgcgcccggtggacaagccgctgcgcctgcccctgcaggacgtgtacaagatcggcggtatcgggacggtgcccgtggggcgcgtggagaccggcatcatgaagccgggcgacgtggtgacgttcgcgcccgccaacgtgacgactgaggtgaagtcgatcgagatgcaccacgagcagctggcggaggcgcagcccggcgacaacgtcggcttcaacgtgaagaacgtgtcggtgaaggacatccgccgtggtaacgtgtgcggcaactcgaagaacgacccgccgaaggaggcggccgacttcacggcgcaggtgatcgtgctgaaccaccccggccagatcagcaacggctacgcgccggtgctggactgccacacgagccacattgcgtgccgcttcgcggaaatcgagtccaagatcgaccgccgctccggcaaggagctggagaagaaccccaaggcgatcaagtctggcgatgccgcgatcgtgaagatggtgccgcagaagccgatgtgcgtggaggtgttcaacgactacgcgccgctgggccgctttgccgtgcgcgacatgcgccaaaccgttgccgtcgg

SEQ ID NO: 517 - DNA, 1099 bp, Leishmania donovani
  ref <308>: DATABASE ACCESSION NUMBER: ATCC 50212
tacgcgtgggtgctcgacaagctgaaggcggagcgcgagcgcggcatcacgatcgacattgcgctgtggaagttcgagtcgcccaagtccgtgttcacgatcatcgatgcgcccggccaccgcgacttcatcaagaacatgatcacgggcacgtcgcaggcggacgccgccatcctgatgatcgactcgacgcatggtggcttcgaggctggcatctcgaaggacggccagacccgcgagcacgcgctgcttgccttcacgcttggcgtgaagcagatggtggtgtgctgcaacaagatggacgacaagaccgtgacgtacgcgcagtcgcgctacgatgagatcagcaaggaggtgggcgcgtacctgaagcgcgtgggctacaacccggagaaggtgcgcttcatcccgatctcgggctggcagggcgacaacatgatcgagaggtcggacaacatgccgtggtacaagggtcccacgctgctggacgcgctcgacatgctggagccgccggtgcgcccggtggacaagccgctgcgcctgcccctgcaggacgtgtacaagatcggcggtatcgggactgtgcccgtgggccgcgtggagaccggcatcatgaagccgggcgacgtggtgacgttcgcgcccgccaacgtgacgactgaggtgaagtcgatcgagatgcaccacgagcagctggcggaggcgcagcccggcgacaacgtcggcttcaacgtgaagaacgtgtcggtgaaggacatccgccgtggcaacgtgtgcggcaactcgaagaacgacccgccgaaggaggcggccgacttcacggcgcaggtgatcgtgctgaaccaccccggccagatcagcaacggctacgcgccggtgctggactgccacacgagccacattgcgtgccgcttcgcggaaatcgagtccaagatcgaccgccgctccggcaaggagctggagaagaaccccaaggcgatcaagtctggcgatgccgcgatcgtgaagatggtgccgcagaagccgatgtgcgtggaggtgttcaacgactacgcgccgctgggccgctttgccgtgcgcgacatgcgccaaaccgttg

SEQ ID NO: 518 - DNA, 1098 bp, Leishmania infantum
  strain MOU
tacgcgtgggtgctcgacaagctgaaggcggagcgcgagcgcggcatcacgatcgacattgcgctgtggaagttcgagtcgcccaagtccgtgttcacgatcatcgatgcgcccggccaccgcgacttcatcaagaacatgatcacgggcacgtcgcaggcggacgccgccatcctgatgatcgactcgacgcatggtggcttcgaggctggcatctcgaaggacggccagacccgcgagcacgcgctgcttgccttcacgcttggcgtgaagcagatggtggtgtgctgcaacaagatggacgacaagaccgtgacgtacgcgcagtcgcgctacgatgagatcagcaaggaggtgggcgcgtacctgaagcgcgtgggctacaacccggagaaggtgcgcttcatcccgatctcgggctggcagggcgacaacatgatcgagaggtcggacaacatgccgtggtacaagggtcccacgctgctggacgcgctcgacatgctggagccgccggtgcgcccggtggacaagccgctgcgcctgcccctgcaggacgtgtacaagatcggcggtatcgggactgtgcccgtgggccgcgtggagaccggcatcatgaagccgggcgacgtggtgacgttcgcgcccgccaacgtgacgactgaggtgaagtcgatcgagatgcaccacgagcagctggcggaggcgcagcccggcgacaacgtcggcttcaacgtgaagaacgtgtcggtgaaggacatccgccgtggcaacgtgtgcggcaactcgaagaacgacccgccgaaggaggcggccgacttcacggcgcaggtgatcgtgctgaaccaccccggccagatcagcaacggctacgcgccggtgctggactgccacacgagccacattgcgtgccgcttcgcggaaatcgagtccaagatcgaccgccgctccggcaaggagctggagaagaaccccaaggcgatcaagtctggcgatgccgcgatcgtgaagatggtgccgcagaagccgatgtgcgtggaggtgttcaacgactacgcgccgctgggccgctttgccgtgcgcgacatgcgccaaaccgtt

SEQ ID NO: 519 - DNA, 1071 bp, Leishmania enriettii
  ref <308>: DATABASE ACCESSION NUMBER: ATCC 50120
ctcgacaagctgaaggcggagcgcgagcgcggcatcacgatcgacattgcgctgtggaagttcgagtcgcccaagtctgtgttcacgatcatcgatgcgcccggccaccgcgacttcatcaagaacatgatcaccggcacgtcgcaggccgacgccgccatcctgatgatcgactcgacccagggcggcttcgaggctggcatctcgaaggacggccagacccgcgagcacgcgctgctcgccttcacgcttggtgtgaagcagatggtggtgtgctgcaacaagatggacgacaagacggtgcagtactcgcaggcgcgctacgaggagatcagcaaggaggtgggcgcgtacctgaagcgcgtcggctacaacccggagaaggtgcgcttcatcccgatctcgggctggcagggcgacaacatgatcgacaagtcggacagcatgccgtggtacaaggggcccacgctgctggacgcgctcgacatgctggaggcgccggtgcgcccggtggacaagccgctgcgcctgcccctgcaggacgtgtacaagatcggcggtatcgggacggtgcccgtgggccgcgtggagaccggcatcatgaagcctggcgacgtggtgacgtttgcgcccgccaacgtgacgacggaggtgaagtcgatcgagatgcaccacgagcagctggcggaggcggtgcccggcgacaacgtcggcttcaacgtgaagaacgtgtcggtgaaggacatccgccgtggtaacgtgtgcggcaactcgaagaacgacccgccgaaggaggcggccgacttcacggcgcaggtgatcgtgctgaaccaccctggccagatcagcaacggctacgcgccggtgctggactgccacacgagccacatcgcgtgccgcttcgcggatatcgagtccaagatcgaccgccgctctggcaaggagctggagaagaaccccaaggcgatcaagtccggcgatgcggccatcgtgaagatggtgccgcagaagccgatgtgcgtggaggtgttcaacgactacccgccgctggggcgcttcgctgtgcgcgac

SEQ ID NO: 520 - DNA, 1071 bp, Leishmania gerbilli
  ref <308>: DATABASE ACCESSION NUMBER: ATCC 50121
ctcgacaagctgaaggcggagcgcgagcgcggcatcacgatcgacattgcgctgtggaagttcgagtcgcccaagtccgtgttcacgatcatcgatgcgcccggccaccgcgacttcatcaagaacatgatcacgggcacgtcgcaggcggacgccgccatcctgatgatcgactcgacgcatggtggcttcgaggctggcatctcgaaggacggccagacccgcgagcacgcgctgcttgccttcactcttggcgtgaagcagatggtggtgtgctgcaacaagatggacgacaagacggtgacgtacgcgcagtcgcgctacgatgagatcagcaaggaggtgggcgcgtacctgaagcgcgtgggctacaacccggagaaggtgcgcttcatcccgatctcgggctggcagggcgacaacatgatcgagaagtcggacaacatgccgtggtacaagggtcccacgctgctggacgcgctcgacatgctggagccgccggtgcgcccggtggacaagccgctgcgcctgcccctgcaggacgtgtacaagatcggcggtatcgggacggtgcccgtgggccgcgtggagaccggcatcatgaagccgggcgacgtggtgacgttcgcgcccgccaacgtgacgactgaggtgaagtcgatcgagatgcaccacgagcagctggcggaggcgcagcccggcgacaacgtcggcttcaacgtgaagaacgtgtcggtgaaggacatccgccgtggtaacgtgtgcggcaactcgaagaacgacccgccgaaggaggcggccgacttcacggcgcaggtgatcgtgctgaaccaccccggccagatcagcaacggctatgcgccggtgctggactgccacacgagccacattgcgtgccgcttcgcggaaatcgagtccaagatcgaccgccgctccggcaaggagctggagaagaaccccaaggcgatcaagtctggcgatgccgcgatcgtgaagatggtgccgcagaagccgatgtgcgtggaggtgttcaacgactacgcgccgctgggccgctttgccgtgcgcgac

SEQ ID NO: 521 - DNA, 1114 bp, Leishmania hertigi
  ref <308>: DATABASE ACCESSION NUMBER: ATCC 50125
tcgttcaagtacgcgtgggtgctcgacaagctgaaggcggagcgcgagcgcggtatcacgatcgacattgcgctgtggaagttcgagtcgcccaagtcggtgttcacgatcatcgatgcgcccggccaccgcgacttcatcaagaacatgatcaccggcacgtcgcaggcggatgctgccattctgatgatcgattcgacgcagggtggcttcgaggctggcatctcgaaggacggccagacgcgcgagcacgcgctgctggccttcacgctgggcgtgaagcagatggttgtgtgctgcaacaagatggacgacaagacggtgcagtacgcgcaggcgcgctacgaggagatcagcaaggaggtgggcgcgtacctgaagcgcgtgggctacaacccggagaaggtgcgcttcatcccgatctcgggctggcagggcgacaacatgatcgagaagtccgacaacatgtcgtggtacaagggtcccacgctgctggaggcgctggacatgctggaggcgccggtgcgcccggtggacaagccgctgcgcctgcccctgcaggacgtgtacaagatcggcggcattggcacggtgccggtgggccgtgtggagaccggcatcatgaagcccggcgacgtggtgacgttcgcgcccgccaacgtgacgacggaggtgaagtcgatcgagatgcaccacgagcagctgcaggaggctgtgcccggcgacaacgtcggcttcaacgtgaagaacgtgtcggtgaaggacatccgccgtggtaacgtgtgtggcaactcgaagaacgacccgccgaaggaggcggctgacttcacggcgcaggtgatcgtgctgaaccaccccggccagatcagcaacggctacgcgccggtgctggactgccacaccagccacatcgcgtgccgcttcgcggacatcgagtcgaagatcgaccgccgctccggcaaggagctggagaagaaccccaagtccatcaagtccggcgacgccgccatcgtgaagatggtgccgcagaagccgatgtgcgtggaggtgttcaacgactacccgccgctgggccgctttgcggtgcgcgacatgcgccaaaccgttgccgtcg

SEQ ID NO: 522 - DNA, 1106 bp, Leishmania major
  ref <308>: DATABASE ACCESSION NUMBER: ATCC 50122
tacgcgtgggtgctcgacaagctgaaggcggagcgcgagcgcggcatcacgatcgacattgcgctgtggaagttcgagtcgcccaagtccgtgttcacgatcatcgatgcgcccggccaccgcgacttcatcaagaacatgatcacgggcacgtcgcaggcggacgccgccattctgatgatcgactcgacgcatggcggcttcgaggctggcatctcgaaggacggccagacccgcgagcacgcgctgcttgccttcactcttggcgtgaagcagatggtggtgtgctgcaacaagatggacgacaagacggtgacgtacgcgcagtcrcgctacgatgagatcagcaaggaggtgggcgcgtacctgaagcgcgtgggctacaacccggagaaggtgcgcttcatcccgatctcgggctggcagggcgacaacatgatcgagaagtcggacaacatgccgtggtacaagggtcccacgctgctggacgcgctcgacatgctggagccgccggtgcgcccggtggacaagccgctgcgcctgcccctgcaggacgtgtacaagatcggcggtatcgggacggtgcccgtgggccgcgtggagaccggcatcatgaagccgggcgacgtggtgacgttcgcgcccgccaacgtgacgactgaggtgaagtcgatcgagatgcaccacgagcagctggcggaggcgcagcccggcgacaacgtcggcttcaacgtgaagaacgtgtcggtgaaggacatccgccgtggtaacgtgtgcggcaactcgaagaacgacccgccgaaggaggcggccgacttcacggcgcaggtgatcgtgctgaaccaccccggccagatcagcaacggctatgcgccggtgctggactgccacacgagccacattgcgtgccgcttcgcggaaatcgagtccaagatcgaccgccgctccggcaaggagctggagaagaaccccaaggcgatcaagtctggcgatgccgcgatcgtgaagatggtgccgcagaagccgatgtgcgtggaggtgttcaacgactacgcgccgctgggccgctttgccgtgcgcgacatgcgccaaaccgttgccgtcgg

SEQ ID NO: 523 - DNA, 1105 bp, Leishmania amazonensis
  ref <308>: DATABASE ACCESSION NUMBER: ATCC 50131
tacgcgtgggtgctcgacaagctgaaggcggagcgcgagcgcggcatcacgatcgacattgcgctgtggaagttcgagtcgccgaagtccgtgttcacgatcatcgatgcgcccggccaccgcgacttcatcaagaacatgatcacgggcacgtcgcaggcggacgcggccatcctgatgatcgactcgacgcatggtggcttcgaggctggcatctcgaaggacggccagacccgcgagcacgcgctgcttgccttcactcttggcgtgaagcagatggtggtgtgctgcaacaagatggacgacaagacggtgatgtacgcgcagtcgcgctacgatgagatcagcaaggaggtgagcgcgtacctgaagcgcgtgggctacaacccggagaaggtgcgcttcatcccgatctcggggtggcagggcgacaacatgatcgacaagtcggacaacatgccgtggtacaagggtcccacgctgctggacgcgctcgacatgctggagccgccggtgcgcccggtggacaagccgctgcgcctgcccctgcaggacgtgtacaagatcggcggtatcgggacggtgcccgtgggccgcgtggagaccgggatcatgaagccgggcgacgtggtgacgttcgcgcccgccaacgtgacgactgaggtgaagtcgatcgagatgcaccacgagcagctggcggaggcgcagcccggcgacaacgtcggcttcaacgtgaagaacgtgtcggtgaaggacatccgccgtggtaacgtgtgcggcaactcgaagaacgacccgccgaaggaggcggccgacttcacggcgcaggtgatcgtgctgaaccaccccggccagatcagcaacggctacgcgccggtgctggactgccacacgagccacatcgcgtgccgcttcgcggagatcgagtccaagatcgaccgccgctccggcaaggagctggagaagaaccccaaggcgatcaagtctggcgacgccgcgatcgtgaagatggtgccgcagaagccgatgtgcgtggaggtgttcaacgactacgcgccgctgggccgctttgccgtgcgcgacatgcgccaaaccgttgccgtcg

SEQ ID NO: 524 - DNA, 1098 bp, Leishmania mexicana
  ref <308>: DATABASE ACCESSION NUMBER: ATCC 50156
tacgcgtgggtgctcgacaagctgaaggcggagcgcgagcgcggcatcacgatcgacattgcgctgtggaagttcgagtcgccgaagtccgtgttcacgatcatcgatgcgcccggccaccgcgacttcatcaagaacatgatcacgggcacgtcgcaggcggacgcggccatcctgatgatcgactcgacgcatggtggcttcgaggctggcatctcgaaggacggccagacccgcgagcacgcgctgcttgccttcactcttggcgtgaagcagatggtggtgtgctgcaacaagatggacgacaagacggtgatgtacgcgcagtcgcgctacgatgagatcagcaaggaggtgagcgcgtacctgaagcgcgtgggctacaacccggagaaggtgcgcttcatcccgatctcggggtggcagggcgacaacatgatcgacaagtcggacaacatgccgtggtacaagggtcccacgctgctggacgcgctcgacatgctggagccgccggtgcgcccggtggacaagccgctgcgcctgcccctgcaggacgtgtacaagatcggcggtatcgggacggtgcccgtgggccgcgtggagaccgggatcatgaagccgggcgacgtggtgacgttcgcgcccgccaacgtgacgactgaggtgaagtcgatcgagatgcaccacgagcagctggcggaggcgcagcccggcgacaacgtcggcttcaacgtgaagaacgtgtcggtgaaggacatccgccgtggtaacgtgtgcggcaactcgaagaacgacccgccgaaggaggcggccgacttcacggcgcaggtgatcgtgctgaaccaccccggccagatcagcaacggctacgcgccggtgctggactgccacacgagccacatcgcgtgccgcttcgcggagatcgagtccaagatcgaccgccgctccggcaaggagctggagaagaaccccaaggcgatcaagtctggcgacgccgcgatcgtgaagatggtgccgcagaagccgatgtgcgtggaggtgttcaacgactacgcgccgctgggccgctttgccgtgcgcgacatgcgccaaaccgtt

SEQ ID NO: 525 - DNA, 1081 bp, Leishmania tarentolae
  strain II WT
gctgaaggcggagcgcgagcgcggcatcacgatcgacattgcgctgtggaagttcgagtcgcccaagtcggtgttcacgatcatcgatgcgcccggccaccgcgacttcatcaagaacatgatcacgggcacgtcgcaggcggacgcggccatcctgatgatcgactcgacgcacggtgggttcgaggctggcatctcgaaggacgggcagacgcgcgagcacgcgctgcttgccttcactcttggcgtgaagcagatggttgtgtgctgcaacaagatggacgacaagacggtgatgtacgcgcagtcgcgctacgatgagatcagcaaggaggtgggcgcgtacctgaagcgcgtgggctacaacccggagaaggtgcgcttcatcccgatctcgggctggcagggcgacaacatgatcgagaagtcggacaacatgccgtggtacaagggtcccacgctgctggacgcgctcgacatgctggaggcgccggtgcgcccggtggacaagccgctgcgcctgcccctgcaggacgtgtacaagatcggcggcatcggcacggtgcccgtgggccgcgtggagaccggcatcatgaagccgggcgacgtggtgacgttcgcgcccgcgaacgtgacgacggaggtgaagtcgatcgagatgcaccacgagcagctggcggaggcgcagcccggcgacaacgtcggcttcaacgtgaagaacgtgtcggtgaaggacatccgccgtgggaacgtgtgcggtaactcgaagaacgacccgccgaaggaggccgccgacttcacggcgcaggtgatcgtgctgaaccaccccggccagatcagcaacggctacgcgccggtgctggactgccacacgagccacatcgcgtgccggttcgcggacatcgagtccaagattgaccgccgctccggcaaggagctggagaagaaccccaaggcgatcaagtccggcgatgccgcgatcgtgaagatggtgccgcagaagccgatgtgcgtggagatgttcaacgactacgcgccgcttggccgctttgctgtgcgcgacatgcgccaaaccgttgcc

SEQ ID NO: 526 - DNA, 1102 bp, Leishmania tropica
  ref <308>: DATABASE ACCESSION NUMBER: ATCC 50129
aaatacgcgtgggtgctcgacaagctgaaggcggagcgcgagcgcggcatcacgatcgacattgcgctgtggaagttcgagtcgcccaagtccgtgttcacgatcatcgatgcgcccggccaccgcgacttcatcaagaacatgatcacgggcacgtcgcaggcggacgccgccatcctgatgatcgactcgacgcatggtggcttcgaggctggcatctcgaaggacggccagacccgcgagcacgcgctgcttgccttcackcttggcgtgaagcagatggtggtgtgctgcaacaagatggacgacaagacggtgacgtacgcgcagtcgcgctacgatgagatcagcaaggaggtgggcgcgtacctgaagcgcgtgggctacaacccggagaaggtgcgcttcatcccgatctcgggctggcagggcgacaacatgatcgagaagtcggacaacatgccgtggtacaagggtcccacgctgctggacgcgctcgacatgctggagccgccggtgcgcccggtggacaagccgctgcgcctgcccctgcaggacgtgtacaagatcggcggtatcgggacggtgcccgtggggcgcgtggagaccggcatcatgaagccgggcgacgtggtgacgttcgcgcccgccaacgtgacgactgaggtgaagtcgatcgagatgcaccacgagcagctggcggaggcgcagcccggcgacaacgtcggcttcaacgtgaagaacgtgtcggtgaaggacatccgccgtggtaacgtgtgcggcaactcgaagaacgacccgccgaaggaggcggccgacttcacggcgcaggtgatcgtgctgaaccaccccggccagatcagcaacggctacgcgccggtgctggactgccacacgagccacattgcgtgccgcttcgcggaaatcgagtccaagatcgaccgccgctccggcaaggagctggagaagaaccccaaggcgatcaagtctggcgatgccgcgatcgtgaagatggtgccgcagaagccgatgtgcgtggaggtgttcaacgactacgcgccgctgggccgctttgccgtgcgcgacatgcgccaaaccgttg

SEQ ID NO: 527 - DNA, 1105 bp, Neospora caninum
  strain Suarez-4
  misc_feature (1)...(1105): n=a,t,c or g
ggacraacttaaagctgaacgtgagcgtggtatcaccattgatatctccctgtggaaatttgagaccagcaagtactatgttaccatcattgatgccccaggacacagagacttcatcaaaaacatgattacaggcacatcccaggctgactgtgctgtcctgattgttgctgctggtgttggtgaatttgaagccggtatctccaagaacgggcagacccgtgagcatgcccttntggcttacaccctgggtgtgaaacaactaattgttggcgttaacaaaakggattccactgagccaccctatagccaraagagatacgargaaattgttaaggaagtcagcmcctaynttaaaaaaattggytacaaccccgacacagtancatttgkgccaatttntggctggaatggtgacaacatgctgganccaagtgctaatatgccatggttcaagggatggaaagtcmcccgtaaggacggcaatgccagkggaaccmccctgcttgaagctytggattgcattytgccaccaayttgcccaactgacaaacccttgcgtttgcctytccaggatgtctataaaattggkggtattggtactgtccctgtgggtcgtgtggagactggtgttctcaaacctggcatggtggtcacctttgctccagtcaatgtaacaactgaagtgaagtctgtagaaatgcaccatgaagcattgagtgaagcccttcctggggacaatgtgggcttcaatgtcaagaacgtgtctgtcaaagatgtccgtcgtggcaatgtggctggtgacagcaaaaatgatccacccatggaagctgctggcttcacagctcaggtgattattttgaaccatccaggccaaatcagtgctggatatgcacctgtgctggattgtcacacagctcacattgcttgcaagtttgctgagctgaaggagaagattgatcgtcgttctgggaaaaagctggaagatggccctaaattcttgaaatctggtgacgctgccatcgttgatatggttcctggcaagcccatgtgtgtcgagagcttctctgattatcctcccctgggccgttttgctgtgcgtgac

SEQ ID NO: 528 - DNA, 935 bp, Trichomonas vaginalis
  ref <308>: DATABASE ACCESSION NUMBER: ATCC 30001
gcacatcccaggctgatgctgctatccttgtcatcgactccacactcggtggyttcgaagccggtatcgctgaacaaggccagacacgtgaacacgctcttcttgccttcacactcggcatcaagcaggtcattgtcgccgtcaacaagatggatgacaagacagtcaactacaacaaggcycgtttcgacgaaatcacagccgaaatgacacgcatccttacaggcatcggctacaagccagaaatgttccgcttcgtcccaatctccggctgggctggcgacaacatgacagagaagtctccaaacatgccatggtacaatggcccataccttcttgaagccctcgattcccttcagccaccaaagcgcccattcgacaagccactccgtcttccactccaggatgtctacaagatcaacggtatcggtacagttccagtcggccgtgtcgaatccggcacaatgaagccaggcatgatcgttaacttcgccccatccacagttacagctgaagttaagtccatcgaaatgcaccacgaatcccttccagaggctcttccaggtgacaacatcggcttcaacgtcaagaacgtttccacagctgatgtcaagcgtggctacgtcgttggtgatacaaagcgtgacccaccagtcgaatgcgcttccttcacagctcaratgatcatctccaaccacccaggcaagatccacgccggctaccagccagttttcgactgccacacagctcacatcgcctgcaagttcgacaagctcatccagcgtatcgatcgtcgccacggcaagaaggctacagagaacccagaatacattcagaaggatgatgccgctatcgtcgaggttgtcccatccaagccactcgtcgtcgagtccttccaggagtacccaccactcggccgtttcgccatccgtgat

SEQ ID NO: 529 - DNA, 1065 bp, Trypanosoma brucei subsp. brucei
  strain EATRO795
aagctgaaggctgagcgcgaacgtggtatcacgatcgacattgcactgtggaaattcgagtcacccaagtctgtcttcactattattgatgctcctgggcaccgtgacttcatcaagaacatgatcaccggcacatcgcaagccgacgcagccatcctcatcattgcctctgcgcagggtgagttcgaggctggtatctccaaggatggacagacccgcgagcacgcgttgctggccttcactttgggtgtgaagcagatggttgtgtgctgcaacaagatggacgacaagactgtgaactacggacaggagcggtatgacgagattgtgaaggaggtgtctgcttacatcaagaaggttgggtacaacgtggagaaggtgcgcttcgtccccatctccggatggcagggcgacaacatgattgagaaatccgagaagatgccatggtacaagggtccaacgctcctggaggcactagacatgctggagccaccagtgcgtccgagcgacaagcccctgcgtctgccactgcaggacgtgtacaagatcggtggtattggcaccgtgcccgttggtcgtgtggagaccggcgtgatgaagcctggtgatgtggtgacgtttgcccccgccaacgtgacgaccgaggtgaaatcgatcgagatgcaccacgagcagctcgctgaggcgacccccggtgacaacgtcggctttaacgtgaagaacgtttctgtaaaggacatccgccgtggcaacgtctgcggtaacaccaagaacgaccccccaaaggaggccgccgacttcacggcacaggtgatcatcctgaaccaccccggacagattggaaacggttatgcgcccgtgctggactgccacacatcgcacattgcctgcaagttcgcggagatcgagtcgaagatcgaccgtcgctctggcaaggagctggagaaggctcccaagtcgatcaagtctggcgacgccgcgatcgtgcgcatggtgccgcagaagcctatgtgcgtggaggtcttcaacgactacgcgccactcggccgctttgccgtgcgtgac

SEQ ID NO: 530 - DNA, 1297 bp, Crithidia fasciculata
  ref <308>: DATABASE ACCESSION NUMBER: ATCC 11745
ttcgcggagggcgtgccgccggtgctgacggcgctggacgtgacggaggacctcggccgcgacgagccgctgacgctggagattgtgcagcacttggacgcgaacaccggccgctgcattgccatgcagacgacggatctgctgaagctgaagtcgaaggttgtgtcgacgggcggcaacatctccgtgccggttggccgcgagacgctgggccgcatcttcaacgtgctcggcgacgcgatcgaccagcgcggtgtggtgggcgagaagatgcgcatgccgatccacgccgaggcgccgaagctggcggaccaggccgcggaggacgcgattctgacgaccggcatcaaggtgatcgacctgattctgccgtactgcaagggtggcaagatcgggctgttcggcggtgctggtgtgggcaagactgtgatcatcatggagctgatcaacaacgtggccaagggccacggtggtttctccgtgttcgccggcgttggcgagcgcacccgcgagggcacggatctgtacctggagatgatgcagtcgaaggtcattgacctgaagggcgagtcgaagtgcgtgctggtgtacggccagatgaacgagcccccgggtgcgcgtgcgcgtgttgcgcagtctgcgctgacgatggcggagtacttccgtgacgtggagggccagaacgtgctgctgttcatcgacaacatcttccgcttcacccaggccaactccgaggtgtccgccctgctgggccgcattcccgccgccgtgggctaccagccgacgcttgccgaggatcttggtatgctgcaggagcgcattacgtcgacgacgaagggctcgattacgtctgtgcaggccgtgtacgtgccggccgatgatatcacggatccggcgccggcgacgaccttctcgcacctggatgcgacgacggtgctggaccgcgcggttgccgagtctggcatctaccccgccgtgaacccgctggagtgcgcgtcgcgtatcatggaccccgatgtgatcgacgtggaccactacaacgttgcgcaggatatcgtgcagatgctgaccaagtacaaggagctgcaggatatcattgccgtgctgggtatcgacgagctgagcgaggaggacaagcttgtggtggaccgcgctcgcaaggtgacgcgcttcctgtcgcagccgttccaggtggccgaggtgttcaccggcatgacgggccactacgtgcagctggaggacacagtggagtcgttctctggcctgctgatgggctcgtacgaccagatcccggaga

SEQ ID NO: 531 - DNA, 1298 bp, Leishmania tropica
  ref <308>: DATABASE ACCESSION NUMBER: ATCC 30816
cttctcggagggcgtgccgcccgtgctgacggcgctggatgtgacggaggaccttggccgcgatgagccgctgacgctggagatcgtgcagcacttggacgcgaacacgggccgctgcattgcgatgcagacgacggacctgctgaagctgaagtcgaaggtcgtgtcgaccggcggcaacatctctgtgccggtgggccgtgagacgctgggccgcatcttcaaygttctgggcgacgcgatcgaccagcgcggccccgtgggcgagaagatgcgcatggcgatccacgccgaggccccgaagctggcggatcaggccgcggaggacacgatcctgacgaccggcatcaaggtgatcgacctgattctgccctactgcaagggtggcaagatcggcctgttcggcggtgccggtgtgggcaagactgtgatcatcatggagctgatcaacaacgtcgcgaagggccacggcggtttctccgtgtttgccggcgttggcgagcgcacgcgcgagggcacggacctgtacctggagatgatgcagtcgaaggtgattgacctgaagggcgagtcgaagtgygtgcttgtgtatgggcagatgaacgagcccccgggtgcgcgcgcgcgcgttgcgcagtctgcgctgacgatggcggagtacttccgcgacgtggagggccagaacgtgctgctgttcatcgacaacatcttccgcttcacgcaggcgaactccgaggtgtctgcgctgctgggccgcattccggccgccgtgggctaccagccgacgcttgcggaggatcttggtatgctgcaggagcgcatcacgtcgacaacgaaggggtcgatcacgtccgtgcaggccgtgtacgtgccagcggatgatatcacggatcccgcgcccgcgacgacgttctcgcacctggacgcgacgactgtgctggaccgcgcggtggcggagtcgggcatctaccctgccgtgaacccgctggagtgcgcgtcgcgtatcatggaccctgatgtgatcgatgtggaccactacaacgttgcgcaggatatcgtgcagatgctgaccaagtacaaggagctgcaggatatcattgcggtgcttggcatcgacgagctgagcgaggaagacaaggttgttgtggaccgcgcgcgcaaggtgacccggttcctgtcgcagccgttccaggttgcggaggtgttcacgggcatgacgggccactacgtgcagctggtcgacacggtggagtcgttctctggcctgctgatggggtcgtacgaccagatcccggaga

SEQ ID NO: 532 - DNA, 1297 bp, Leishmania aethiopica
  ref <308>: DATABASE ACCESSION NUMBER: ATCC 50119
ttctcggagggcgtgccgcccgtgctgacggcgctggatgtgacggaggaccttggccgcgatgagccgctgacgctggagatcgtgcagcacttggacgcgaacaccggccgctgcattgcgatgcagacgacggacctgctgaagctgaagtcgaaggttgtgtcgaccggcggcaacatctctgtgccggtgggccgtgagacgctgggccgcatcttcaacgttctgggcgacgcgatcgaccagcgcggccccgtgggcgagaagatgcgcatggcgatccacgccgaggccccaaagctggcggatcaggccgcggaggacacgatcctgacgaccggcatcaaggtgatcgacctgattctgccctactgcaagggtggcaagatcggcctgttcggcggtgccggtgtgggcaagactgtgatcatcatggagctgatcaacaacgtcgcgaagggccacggtggtttctccgtgtttgccggcgttggcgagcgcacgcgcgagggcacggacctgtacctggagatgatgcagtcgaaggtgattgacctgaagggcgagtcgaagtgcgtgcttgtgtacgggcagatgaacgagcccccgggtgcgcgcgcgcgcgttgcgcagtctgcgctgacgatggcggagtacttccgcgacgtggagggccagaacgtgctgctgttcatcgacaacatcttccgcttcacgcaggcgaactccgaggtgtctgcgctgctgggccgcattccagccgccgtgggctaccagccgacgcttgcggaggatcttggtatgctgcaggagcgcatcacgtcgacaacgaaggggtcgatcacgtccgtgcaggccgtgtacgtgccagcggatgatatcacggatcccgcgcccgcgacgacgttctcgcacctggacgcgacgactgtgctggaccgcgcggtggcggagtcgggcatctaccctgccgtgaacccgctggagtgcgcgtcgcgtatcatggaccccgacgtgatcgatgtggaccactacaacgttgcgcaggatatcgtgcagatgctgaccaagtacaaggagctgcaggatatcattgcggtgcttggcatcgacgagctgagcgaggaagacaaggttgttgtggaccgcgcgcgcaaggtgacccggttcctgtcgcagccgttccaggttgcggaggtgttcacgggcatgacgggccactacgtgcagctggtcgacacggtggagtcgttctctggcctgctgatggggtcgtacgaccagatcccggaga

SEQ ID NO: 533 - DNA, 1298 bp, Leishmania donovani
  ref <308>: DATABASE ACCESSION NUMBER: ATCC 50212
cttctcggagggcgtgccgcccgtactgacggcgctggatgtgacggaggaccttggccgcgatgagccgctgacgctggagatcgtgcagcacttggatgcgaacaccggccgctgcattgcgatgcagacgacggacctgctgaagctgaagtcgaaggttgtgtcgaccggcggcaacatctctgtgccggtgggccgtgagacgctgggccgcatcttcaacgttctgggcgacgcgatcgaccagcgcggccccgtgggcgagaagatgcgcatggcgatccacgccgaggccccgaagctggcggaccaggccgcggaggacacgatcctgacgaccggcatcaaggtgatcgacctcattctgccctactgcaagggcggcaagatcggcctgttcggcggtgccggtgtgggcaagactgtgatcatcatggagctgatcaacaacgtcgcgaagggccacggtggcttctccgtgtttgccggcgttggcgagcgcacgcgcgagggcacggacctatacctggagatgatgcagtcgaaggtgattgacctgaagggcgagtcgaagtgcgtgcttgtgtacgggcagatgaacgagcccccgggtgcgcgcgcgcgcgttgcgcagtctgcgctgacgatggcggagtacttccgcgacgtggagggccagaacgtgctgctgttcatcgacaacatcttccgcttcacgcaggcgaactccgaggtgtctgcgctgctgggccgcattccggccgccgtgggctaccagccgacgcttgccgaggatcttggtatgctgcaggagcgcatcacatcgacgacgaaggggtcgatcacgtccgtgcaggccgtgtacgtgccggcggatgatatcacggatcccgcgcccgcgacgacgttctcgcacctggacgcgacgactgtgctggaccgcgcggtggcggagtcgggcatctaccctgccgtgaacccgctggagtgcgcgtcgcgtatcatggaccccgatgtgatcgatgtggaccactacaacgttgcgcaggatatcgtgcagatgctgaccaagtacaaggagctgcaggatatcattgcggtgcttggcatcgacgagctgagcgaggaggacaaggttgtggtggaccgcgcgcgcaaggtgacccggttcctgtcgcagccgttccaggttgcggaggtgttcacgggcatgacgggccactacgtgcagctggccgacacggtggagtcgttctctggcctgctgatggggtcgtacgaccagatcccggaga

SEQ ID NO: 534 - DNA, 1298 bp, Leishmania infantum
  strain MOU
cttctcggagggcgtgccgcccgtactgacggcgctggatgtgacggaggaccttggccgcgatgagccgctgacgctggagatcgtgcagcacttggatgcgaacaccggccgctgcattgcgatgcagacgacggacctgctgaagctgaagtcgaaggttgtgtcgaccggcggcaacatctctgtgccggtgggccgtgagacgctgggccgcatcttcaacgttctgggcgacgcgatcgaccagcgcggccccgtgggcgagaagatgcgcatggcgatccacgccgaggccccaaagctggcggaccaggccgcggaggacacgatcctgacgaccggcatcaaggtgatcgacctcattctgccctactgcaagggcggcaagatcggcctgttcggcggtgccggtgtgggcaagactgtgatcatcatggagctgatcaacaacgtcgcgaagggccacggtggcttctccgtgtttgccggcgttggcgagcgcacgcgcgagggcacggacctatacctggagatgatgcagtcgaaggtgattgacctgaagggcgagtcgaagtgcgtgcttgtgtacgggcagatgaacgagcccccgggtgcgcgcgcgcgcgttgcgcagtctgcgctgacgatggcggagtacttccgcgacgtggagggccagaacgtgctgctgttcatcgacaacatcttccgcttcacgcaggcgaactccgaggtgtctgcgctgctgggccgcattccggccgccgtgggctaccagccgacgcttgccgaggatcttggtatgctgcaggagcgcatcacatcgacgacgaaggggtcgatcacgtccgtgcaggccgtgtacgtgccggcggatgatatcactgatcccgcgcccgcgacgacgttctcgcacctggacgcgacgactgtgctggaccgcgcggtggcggagtcgggcatctaccctgccgtgaacccgctggagtgcgcgtcgcgtatcatggaccccgatgtgatcgatgtggaccactacaacgttgcgcaggatatcgtgcagatgctgaccaagtacaaggagctgcaggatatcattgcggtgcttggcatcgacgagctgagcgaggaggacaaggttgtggtggaccgcgcgcgcaaggtgacccggttcctgtcgcagccgttccaggttgcggaggtgttcacgggcatgacgggccactacgtgcagctggccgacacggtggagtcgttctctggcctgctgatggggtcgtacgaccagatcccggaga

SEQ ID NO: 535 - DNA, 1301 bp, Leishmania gerbilli
  ref <308>: DATABASE ACCESSION NUMBER: ATCC 50121
gcacttctcggagggcgtgccgcccgtgctgacggcgctggatgtgacggaggaccttggccgcgatgagccgctgacgctggagatcgtgcagcacttggacgcgaacaccggccgctgcattgcgatgcagacgacggacctgctgaagctgaagtcgaaggttgtgtcgaccggtggcaacatctctgtgccggtgggccgtgagacgctgggccgcatcttcaacgttctgggcgatgcgatcgaccagcgcggccccgtgggcgagaagatgcgcatggcgatccacgccgaggccccgaagctggcggatcaggccgcggaggacacgatcctgacgaccggcatcaaggtgatcgacctgattctgccctactgcaagggtggcaagatcggyctgttcggcggtgccggtgtgggcaagactgtgatcatcatggagctgatcaacaacgtcgcgaagggccacggtggtttctccgtgtttgccggcgttggcgagcgcacgcgcgagggcacggacctgtacctggagatgatgcagtcgaaggtgattgacctgaagggcgagtcgaagtgcgtgcttgtgtacgggcagatgaacgagcccccgggtgcgcgcgcgcgcgttgcgcagtctgcgctgacgatggcggagtacttccgcgacgtggagggccagaacgtgctgctgttcatcgacaacatcttccgcttcacgcaggcgaactccgaggtgtccgcgctgctgggccgcattccggccgccgtgggctaccagccgacgcttgcggaggatcttggtatgctgcaggagcgcatcacgtcgacaacgaaggggtcgatcacgtccgtgcaggccgtgtacgtgccagcggatgatatcacggatcccgcgcccgcgacgacgttctcgcaccttgacgcgacgactgtgctggaccgcgcggtggcggagtcgggcatctaccctgccgtgaacccgctggagtgcgcgtcgcgtatcatggaccccgatgtgatcgatgtggaccactacaacgttgcgcaggatatcgtgcagatgctgaccaagtacaaggagctgcaggacatcattgcggtgcttggcatcgacgagctgagcgaggaagacaaggttgtggtggaccgcgcgcgcaaggtgacccggttcctgtcgcagccgttccaggttgcggaggtgttcacgggcatgacgggccactacgtgcagctggtcgacacggtggagtcgttctctggcttgctgatggggtcgtacgaccagatcccggaga

SEQ ID NO: 536 - DNA, 1298 bp, Leishmania hertigi
  ref <308>: DATABASE ACCESSION NUMBER: ATCC 50125
cttcgcggagggcgtgccgccggtgctgacgtcgctggatgtgacggagaacctcggccgcgatgagccgctgacgctggagattgtgcagcacttggacgcgaacaccggtcgctgcattgcgatgcagacgacggacctgctgaagctgaagtcgaaggtcgtgtcgaccggtggcaacatctctgtgcctgttggccgcgagacgctgggtcgcatcttcaacgtgcttggcgatgcgattgaccagcgcggccctgtgggtgagaagatgcgcatggcgatccacgccgaggcgccgaagctggcggatcaggcggcagaggacacgatcctgacgaccggcatcaaggtgatcgatcttattctgccgtactgcaagggtggtaagatcggtctgttcggtggtgccggtgtaggcaagactgtgattattatggagctgatcaataacgtggcgaagggccacggtgggttttccgtgtttgctggcgtgggcgagcgcacgcgcgagggcactgacctgtacctggagatgatgcagtcgaaggtgattgacctgaagggcgaatcaaagtgcgtgcttgtgtacggacagatgaacgagcccccgggtgcgcgtgcgcgcgttgcgcagtctgcgctgacgatggccgagtacttccgcgatgtggagggccagaacgtgctgctgttcattgacaacatcttccgcttcacgcaggcgaactccgaggtgtctgcgctgctgggtcgcattcctgccgccgtgggctaccagccgacgcttgcggaggatctgggcatgctgcaggagcgcattacgtcgacgacgaagggctcgattacgtctgtgcaggccgtgtacgtgcctgcggatgatatcacggacccggcgcccgcgacgacgttctcgcacctggacgcgacgactgtgctggaccgtgcggtggcagagtcgggcatttaccctgcggtgaacccgctggagtgcgcgtcgcgtatcatggaccccgatgtgatcgatgtggaccactacaacgttgcgcaggatatcgtgcagatgctgaccaagtacaaggagctgcaggatatcattgccgtgcttggtatcgacgagctgagcgaggaggacaaggttgtggtggaccgcgcgcgcaaggtgacccggttcctgtcgcagccgttccaggttgcggaggtgttcactggcatgacgggtcactacgttcagctggaggacacggtggagtcgttctctggcctactgatggggtcatacgaccagatcccggaga

SEQ ID NO: 537 - DNA, 1297 bp, Leishmania major
  ref <308>: DATABASE ACCESSION NUMBER: ATCC 50122
cttctcggagggcgtgccgcccgtgctgacggcgctggatgtgacggaggaccttggccgtgatgagccgctgacgctggagatcgtgcagcacttggacgcgaacaccggccgctgcattgcgatgcagacgacggacctgctgaagctgaagtcgaaggttgtgtcgaccggcggcaacatctctgtgccggtgggccgtgagacgctgggccgcatcttcaacgttctgggcgatgcgatcgaccagcgcggccccgtgggcgagaagatgcgcatggcgatccacgccgaggccccgaagctggcggatcaggccgcagaggacacgatcctgacgaccggcatcaaggtgatcgacttgatcctgccctactgcaagggtggcaagatcggcctgttcggcggtgccggtgtgggcaagactgtgatcatcatggagctgatcaacaatgtcgcgaagggccacggtggtttctccgtgtttgccggcgttggcgagcgcacgcgcgagggcacggacctgtacctggagatgatgcagtcgaaggtgattgacctgaagggcgagtcgaagtgcgtgcttgtgtacgggcagatgaacgagcccccgggtgcgcgcgcgcgcgttgcgcagtctgcgctgacgatggcggagtacttccgcgacgtggagggccagaacgtgctgctgttcatcgacaacatcttccgcttcacgcaggcgaactccgaggtgtccgcgctgctgggccgcattccggccgccgtgggctaccagccgacgcttgcggaggatcttggtatgctgcaggagcgcatcacgtcgacaacgaaggggtcgatcacgtccgtgcaggccgtgtacgtgccagcggatgatatcacggatcccgcgcccgcgacgacgttctcgcacctggatgcgacgactgtgctggaccgcgcggtggcggagtcgggcatctaccctgccgtgaacccgctggagtgcgcgtcgcgtatcatggaccccgatgtgatcgatgtggaccactacaacgttgcgcaggatatcgtgcagatgctgaccaagtacaaggagctgcaggacatcattgcggtgcttggcatcgacgagctgagcgaggaagacaaggttgtggtggaccgcgcgcgcaaggtgacccggttcctgtcgcagccgttccaggttgcggaggtgttcacgggcatgacgggccactacgtgcagctggtcgacacggtggagtcgttctctggcctgctgatggggtcgtacgaccagatcccggag

SEQ ID NO: 538 - DNA, 1297 bp, Leishmania amazonensis
  ref <308>: DATABASE ACCESSION NUMBER: ATCC 50131
ttctcggagggcgtgccgcccgtgctgacggcgctggatgtgacggaggaccttggccgcgatgagccgctgacgctggagatcgtgcagcacctggacgcgaacaccggccgctgcattgcgatgcagacgacggacctgttgaagctgaagtcgaaggttgtgtcgaccggcggcaacatctctgtgccggtgggccgtgagacgctgggccgcatcttcaacgtgctgggcgacgcgatcgaccagcgcggccccgtgggtgagaagatgcgcatggcgatccacgccgaggccccgaagctggcggatcaggccgcggaggacacgatcctgacgaccggcatcaaggtgatcgacctgattctgccctactgcaagggtggcaagatcggcctgtttggtggcgccggtgtgggcaagaccgtgatcatcatggagttgattaacaacgtcgcgaagggccacggtggtttctcggtgtttgccggcgttggcgagcgcacgcgcgagggcacggacctgtacctggagatgatgcagtcgaaggtgattgacctgaagggcgagtcgaagtgcgtgcttgtgtacgggcagatgaacgagcccccgggtgcgcgcgcgcgcgttgcgcagtctgcgctgacgatggcggagtacttccgagacgtggagggccagaatgtgctgctgttcatcgacaacatcttccgcttcacgcaggcgaactccgaggtgtctgcgctgctgggccgcattccggccgccgtgggctaccagccgacgcttgcggaggatcttggtatgctgcaggagcgcatcacgtcgacgacgaaggggtcgatcacgtccgtgcaggccgtgtacgtgcctgcggatgatatcacggatccggcgcccgcgacgacgttctcgcacctggacgcgacgactgtgctggaccgcgcggtggcggagtcggggatctaccctgccgtgaacccgctggagtgcgcgtcgcgtatcatggaccccgatgtgatcgacgtggaccactacaacgttgcgcaggatatcgtgcagatgctgaccaagtacaaggagctgcaggatatcattgcggtgcttggtatcgacgagctgagcgaggaggacaaggtcgtggtggaccgcgcgcgcaaggtgacccggttcctgtcgcagccgttccaggttgcggaggtgttcacgggcatgacgggccactacgtgcagctggccgacacggtggagtcgttctctgggctgctgatggggtcgtacgaccagatcccggaga

SEQ ID NO: 539 - DNA, 27 bp, Artificial Sequence
  modified_base (3): i
  modified_base (18): i
  modified_base (21): i
  Synthetic DNA Sequence
ccntacatcctbgtygcnctnaacaag

SEQ ID NO: 540 - DNA, 23 bp, Artificial Sequence
  modified_base (6): i
  modified_base (18): i
  Synthetic DNA Sequence
ggdgcntcytcrtcgwantcctg

SEQ ID NO: 541 - DNA, 23 bp, Artificial Sequence
  Synthetic DNA Sequence
gtkgaaatgttccgcaagctgct

SEQ ID NO: 542 - DNA, 24 bp, Artificial Sequence
  Synthetic DNA Sequence
cggaartagaactgsggacggtag

SEQ ID NO: 543 - DNA, 23 bp, Artificial Sequence
  Synthetic DNA Sequence
atcttagtagtttctgctgctga

SEQ ID NO: 544 - DNA, 23 bp, Artificial Sequence
  Synthetic DNA Sequence
aygttgtcgccmggcattmccat

SEQ ID NO: 545 - DNA, 26 bp, Artificial Sequence
  Synthetic DNA Sequence
  modified_base (15): i
  modified_base (18): i
tacatcctbgtygcnctnaacaagtg

SEQ ID NO: 546 - DNA, 23 bp, Artificial Sequence
  modified_base (6): i
  Synthetic DNA Sequence
ccrcgnccggtratggtgaagat

SEQ ID NO: 547 - DNA, 23 bp, Artificial Sequence
  Synthetic DNA Sequence
gtacagttgcttcaggacgtatc

SEQ ID NO: 548 - DNA, 21 bp, Artificial Sequence
  Synthetic DNA Sequence
acgttcgatttcatcacgttg

SEQ ID NO: 549 - DNA, 24 bp, Artificial Sequence
  Synthetic DNA Sequence
gaacgtgatactgacaaaccttta

SEQ ID NO: 550 - DNA, 20 bp, Artificial Sequence
  Synthetic DNA Sequence
gaagaagaacaccaacgttg

SEQ ID NO: 551 - DNA, 25 bp, Artificial Sequence
  Synthetic DNA Sequence
gaagaaaaaatcttcgaactggcta

SEQ ID NO: 552 - DNA, 19 bp, Artificial Sequence
  Synthetic DNA Sequence
tacacggccggtgactacg

SEQ ID NO: 553 - DNA, 25 bp, Artificial Sequence
  Synthetic DNA Sequence
ggccgtgttgaacgtggtcaaatca

SEQ ID NO: 554 - DNA, 24 bp, Artificial Sequence
  Synthetic DNA Sequence
gttccttacatcgttgtttttctc

SEQ ID NO: 555 - DNA, 24 bp, Artificial Sequence
  Synthetic DNA Sequence
tctcgaactttctctatgtatgca

SEQ ID NO: 556 - DNA, 21 bp, Artificial Sequence
  Synthetic DNA Sequence
  modified_base (7): n=a,t,c or g
cggcgcnatcytsgttgttgc

SEQ ID NO: 557 - DNA, 22 bp, Artificial Sequence
  Synthetic DNA Sequence
ccmaggcatraccatctcggtg

SEQ ID NO: 558 - DNA, 20 bp, Artificial Sequence
  Synthetic DNA Sequence
  modified_base (3): i
  modified_base (15): i
tcnttyaartaygcntgggt

SEQ ID NO: 559 - DNA, 23 bp, Artificial Sequence
  Synthetic DNA Sequence
  modified_base (12): i
  modified_base (18): i
ccgacrgcrayngtytgnckcat

SEQ ID NO: 560 - DNA, 23 bp, Artificial Sequence
  Synthetic DNA Sequence
gayttcatyaaraayatgatyac

SEQ ID NO: 561 - DNA, 23 bp, Artificial Sequence
  Synthetic DNA Sequence
  modified_base (3): i
  modified_base (6): i
acngtncggccrccctcacggat

SEQ ID NO: 562 - DNA, 30 bp, Artificial Sequence
  Synthetic DNA Sequence
  modified_base (15): i
  modified_base (18): i
  modified_base (21): i
  modified_base (24): i
  modified_base (27): i
caratgraygarccnccnggngynmgnatg

SEQ ID NO: 563 - DNA, 26 bp, Artificial Sequence
  modified_base (9): i
  modified_base (12): i
  modified_base (15): i
  modified_base (18): i
  modified_base (21): i
  Synthetic DNA Sequence
ggytgrtanccnacngcnganggcat

SEQ ID NO: 564 - DNA, 29 bp, Artificial Sequence
  Synthetic DNA Sequence
  modified_base (6): i
  modified_base (21): i
  modified_base (24): i
  modified_base (27): i
tayggncaratgaaygarccnccnggnaa

SEQ ID NO: 565 - DNA, 26 bp, Artificial Sequence
  Synthetic DNA Sequence
  modified_base (9): i
  modified_base (12): i
  modified_base (15): i
  modified_base (18): i
  modified_base (21): i
ggytgrtanccnacngcnganggdat

SEQ ID NO: 566 - DNA, 26 bp, Artificial Sequence
  Synthetic DNA Sequence
  modified_base (6): i
  modified_base (9): i
  modified_base (12): i
  modified_base (15): i
  modified_base (18): i
  modified_base (21): i
ttyggnggngcnggngtnggnaarac

SEQ ID NO: 567 - DNA, 26 bp, Artificial Sequence
  Synthetic DNA Sequence
  modified_base (6): i
  modified_base (9): i
  modified_base (12): i
  modified_base (18): i
  modified_base (21): i
tcrtcngcnggnacrtanayngcytg

SEQ ID NO: 568 - DNA, 23 bp, Artificial Sequence
  Synthetic DNA Sequence
  modified_base (3): i
  modified_base (6): i
  modified_base (9): i
  modified_base (12): i
  modified_base (15): i
  modified_base (18): i
rtnatnggngcngtnrtngaygt

SEQ ID NO: 569 - DNA, 23 bp, Artificial Sequence
  Synthetic DNA Sequence
  modified_base (3): i
  modified_base (6): i
  modified_base (9): i
  modified_base (12): i
  modified_base (15): i
  modified_base (18): i
rtnrtnggnscngtnrtngatat

SEQ ID NO: 570 - DNA, 23 bp, Artificial Sequence
  Synthetic DNA Sequence
  modified_base (3): i
  modified_base (6): i
  modified_base (9): i
  modified_base (12): i
  modified_base (15): i
  modified_base (18): i
rtnrynggnccngtnrtngaygt

SEQ ID NO: 571 - DNA, 23 bp, Artificial Sequence
  Synthetic DNA Sequence
  modified_base (3): i
  modified_base (6): i
  modified_base (9): i
  modified_base (12): i
  modified_base (15): i
  modified_base (18): i
rtnrtnggnccngtnrtngatgt

SEQ ID NO: 572 - DNA, 20 bp, Artificial Sequence
  Synthetic DNA Sequence
  modified_base (3): i
  modified_base (6): i
  modified_base (9): i
  modified_base (12): i
  modified_base (15): i
  modified_base (18): i
rtnrtnggnscngtnrtnga

SEQ ID NO: 573 - DNA, 20 bp, Artificial Sequence
  Synthetic DNA Sequence
  modified_base (3): i
  modified_base (6): i
  modified_base (18): i
ccnccnaccatrtaraangc

SEQ ID NO: 574 - DNA, 23 bp, Artificial Sequence
  Synthetic DNA Sequence
  modified_base (3): i
  modified_base (6): i
  modified_base (15): i
  modified_base (18): i
atngcnatggayggnacngargg

SEQ ID NO: 575 - DNA, 25 bp, Artificial Sequence
  modified_base (2): i
  Synthetic DNA Sequence
tnaccatttcagtaccttctggtaa

SEQ ID NO: 576 - DNA, 26 bp, Artificial Sequence
  Synthetic DNA Sequence
aacttcrtcaagaaggtyggttacaa

SEQ ID NO: 577 - DNA, 20 bp, Artificial Sequence
  Synthetic DNA Sequence
catgattgaaccatccacca

SEQ ID NO: 578 - DNA, 20 bp, Artificial Sequence
  Synthetic DNA Sequence
catgattgaagcttccacca

SEQ ID NO: 579 - DNA, 20 bp, Artificial Sequence
  Synthetic DNA Sequence
gaaggccgtgctggtgagaa

SEQ ID NO: 580 - DNA, 25 bp, Artificial Sequence
  Synthetic DNA Sequence
gctaaaccagctacaatcactccac

SEQ ID NO: 581 - DNA, 22 bp, Artificial Sequence
  Synthetic DNA Sequence
acatcggtgcattattacgtgg

SEQ ID NO: 582 - DNA, 28 bp, Artificial Sequence
  Synthetic DNA Sequence
tttcaacttcgtcgttgacacgaacagt

SEQ ID NO: 583 - DNA, 35 bp, Artificial Sequence
  Synthetic DNA Sequence
caactgctttttggatatcttctttaataccaacg

SEQ ID NO: 584 - DNA, 20 bp, Artificial Sequence
  Synthetic DNA Sequence
acatgacacatctaaaacaa

SEQ ID NO: 585 - DNA, 20 bp, Artificial Sequence
  Synthetic DNA Sequence
accacatactgaattcaaag

SEQ ID NO: 586 - DNA, 20 bp, Artificial Sequence
  Synthetic DNA Sequence
cagaagtatacgtattatca

SEQ ID NO: 587 - DNA, 20 bp, Artificial Sequence
  Synthetic DNA Sequence
cgtattatcaaaagacgaag

SEQ ID NO: 588 - DNA, 20 bp, Artificial Sequence
  Synthetic DNA Sequence
tcttctcaaactatcgtcca

SEQ ID NO: 589 - DNA, 20 bp, Artificial Sequence
  Synthetic DNA Sequence
gcacgaaacttctaaaacaa

SEQ ID NO: 590 - DNA, 20 bp, Artificial Sequence
  Synthetic DNA Sequence
tatacgtattatctaaagat

SEQ ID NO: 591 - DNA, 20 bp, Artificial Sequence
  Synthetic DNA Sequence
tcctggttctattacaccac

SEQ ID NO: 592 - DNA, 20 bp, Artificial Sequence
  Synthetic DNA Sequence
caaagctgaagtatacgtat

SEQ ID NO: 593 - DNA, 20 bp, Artificial Sequence
  Synthetic DNA Sequence
ttcactaactatcgcccaca

SEQ ID NO: 594 - DNA, 20 bp, Artificial Sequence
  Synthetic DNA Sequence
attggtatccatgacacttc

SEQ ID NO: 595 - DNA, 20 bp, Artificial Sequence
  Synthetic DNA Sequence
ttaaagcagacgtatacgtt

SEQ ID NO: 596 - DNA, 20 bp, Artificial Sequence
  Synthetic DNA Sequence
gaaattattggtatcaaaga

SEQ ID NO: 597 - DNA, 20 bp, Artificial Sequence
  Synthetic DNA Sequence
attggtatcaaagaaacttc

SEQ ID NO: 598 - DNA, 20 bp, Artificial Sequence
  Synthetic DNA Sequence
aattacacctcacacaaaat

SEQ ID NO: 599 - DNA, 20 bp, Artificial Sequence
  Synthetic DNA Sequence
cggtgaagaaatcgaaatca

SEQ ID NO: 600 - DNA, 20 bp, Artificial Sequence
  Synthetic DNA Sequence
atgcaagaagaatcaagcaa

SEQ ID NO: 601 - DNA, 20 bp, Artificial Sequence
  Synthetic DNA Sequence
gtttcacgtgatgatgtaca

SEQ ID NO: 602 - DNA, 20 bp, Artificial Sequence
  Synthetic DNA Sequence
aagttgaagttgttggtatt

SEQ ID NO: 603 - DNA, 20 bp, Artificial Sequence
  Synthetic DNA Sequence
ggtattaaagacgaaacatc

SEQ ID NO: 604 - DNA, 20 bp, Artificial Sequence
  Synthetic DNA Sequence
ggtgatgaagtagaaatcgt

SEQ ID NO: 605 - DNA, 20 bp, Artificial Sequence
  Synthetic DNA Sequence
gaaatgttccgtaaattatt

SEQ ID NO: 606 - DNA, 20 bp, Artificial Sequence
  Synthetic DNA Sequence
attagactacgctgaagctg

SEQ ID NO: 607 - DNA, 821 bp, Enterococcus faecalis
  ref <308>: DATABASE ACCESSION NUMBER: ATCC 29212
cggagctatcttagtagtttctgctgctgatggtcctatgcctcaaacacgtgaacatatcttattatcacgtaacgttggtgtaccatacatcgttgtattcttaaacaaaatggatatggttgatgacgaagaattattagaattagtagaaatggaagttcgtgacttattatcagaatacgatttcccaggcgatgatgttccagttatcgcaggttctgctttgaaagctttagaaggcgacgagtcttatgaagaaaaaatcttagaattaatggctgcagttgacgaatatatcccaactccagaacgtgatactgacaaaccattcatgatgccagtcgaagacgtattctcaatcactggacgtggtactgttgctacaggacgtgttgaacgtggtgaagttcgcgttggtgacgaagttgaaatcgttggtattaaagacgaaacatctaaaacaactgttacaggtgttgaaatgttccgtaaattattagactacgctgaagcaggcgacaacttcggtgctttattacgtggtgtagcacgtgaagatatcgaacgtggacaagtattagctaaaccagctacaatcactccacacacaaaattcaaagctgaagtatacgtattatcaaaagaagaaggcggacgtcacactccattcttcactaactaccgtcctcaattctacttccgtacaacagacgttactggtgttgtagaattgccagaaggtactgaaatggtaatgcctggtgataacgttgctatggacgttgaattaattcacccaatcgctatcgaagacggaa

SEQ ID NO: 608 - DNA, 751 bp, Enterococcus faecium
  ref <308>: DATABASE ACCESSION NUMBER: ATCC 19434
cggagctatcttggtagtttctgctgctgacggcccaatgcctcaaactcgtgaacacatcctattgtctcgtcaagttggtgttccttacatcgttgtattcttgaacaaagtagacatggttgatgacgaagaattactagaattagttgaaatggaagttcgtgacctattaacagaatacraattccctggtgrcgatgttcctgtagttgctggatcagctttgaaagctctagaaggcgacgcttcatacgaagaaaaaattcttgaattaatggctgcagttgacgaatacatcccaactccagaacgtgacaacgacaaaccattcatgatgccagttgaagacgtgttctcaattactggacgtggtactgttgctacaggtcgtgttgaacgtggacaagttcgcgttggtgacgaagttgaagttgttggtattgctgaagaaacttcaaaaacaacagttactggtgttgaaatgttccgtaaattgttagacyacgctgaagctggagacracattggtgctttactacgtggtgttgcacgtgaagacatccaacgtggacaagttttagctaaaccaggtacaatcacacctcrtacaaaattctctgcagaagtatacgtgttgacaaaagaagaaggtggacgtcatactccattcttcactaactaccgtccacaattctacttccgtacaactgacgtaacaggtgttgttgaattaccagaaggaactgaa

SEQ ID NO: 609 - DNA, 751 bp, Enterococcus gallinarum
  ref <308>: DATABASE ACCESSION NUMBER: ATCC 49573
cggtgcgatcttagtagtatctgctgctgacggtcctatgcctcaaactcgtgaacacatcttgttatcacgtaacgttggcgwaccatacatcgttgttttcttgaacaaaatggatatggttgaygacgaagaattgctagaattagttgaaatggaagttcgtgacctattgtctgaatatgacttcccaggcgacgatgttcctgtaatcgccggttctgctttgaaagctcttgaaggagatccttcatacgaagaaaaaatcatggaattgatggctgcagttgacgaatacgttccaactccagaacgtgatactgacaaaccattcatgatgccagtcgaagacgtattctcaatcactggacgtggtactgttgctacaggccgtgttgaacgtggacaagttcgcgttggtgatgaagtagaaatcgttggtattgctgacgaaactgctaaaacaactgtaacaggtgttgaaatgttccgtaaattgttagactatgctgaagcaggggataacattggtgcattgctacgtggggttgctcgtgaagacatccaacgtggacaagtattggctaaagctggtacratcacacctcatacaaaattcaaagctgaagtttatgttttgacaaaagaagaaggtggrcgtcacactccattcttcactaactaccgtcctcagttctacttccgtacaactgacgtaactggtgttgttgaattaccagaaggaactgaa

SEQ ID NO: 610 - DNA, 891 bp, Haemophilus influenzae Rd
  strain KW20
aatatgattactggtgcggcacaaatggatggtgctattttagtagtagcagcaacagatggtcctatgccacaaactcgtgaacacatcttattaggtcgccaagtaggtgttccatacatcatcgtattcttaaacaaatgcgacatggtagatgacgaagagttattagaattagtcgaaatggaagttcgtgaacttctatctcaatatgacttcccaggtgacgatacaccaatcgtacgtggttcagcattacaagcgttaaacggcgtagcagaatgggaagaaaaaatccttgagttagcaaaccacttagatacttacatcccagaaccagaacgtgcgattgaccaaccgttccttcttccaatcgaagatgtgttctcaatctcaggtcgtggtactgtagtaacaggtcgtgtagaacgaggtattatccgtacaggtgatgaagtagaaatcgtcggtatcaaagatacagcgaaaactactgtaacgggtgttgaaatgttccgtaaattacttgacgaaggtcgtgcaggtgaaaacatcggtgcattattacgtggtaccaaacgtgaagaaatcgaacgtggtcaagtattagcgaaaccaggttcaatcacaccacacactgacttcgaatcagaagtgtacgtattatcaaaagatgaaggtggtcgtcatactccattcttcaaaggttaccgtccacaattctatttccgtacaacagacgtgactggtacaatcgaattaccagaaggcgtggaaatggtaatgccaggcgataacatcaagatgacagtaagcttaatccacccaattgcgatggatcaaggtttacgtttcgcaatccgtgaaggtggccgtacagtaggtgcaggc

SEQ ID NO: 611 - DNA, 818 bp, Staphylococcus epidermidis
  ref <308>: DATABASE ACCESSION NUMBER: ATCC 14990
cggcggtatcttagttgtatctgctgctgacggtccaatgccacaaactcgtgaacacatcttattatcacgtaacgttggtgtaccagcattagttgtattcttaaacaaagttgacatggtagacgacgaagaattattagaattagttgaaatggaagttcgtgacttattaagcgaatatgacttcccaggtgacgatgtacctgtaatcgctggttctgcattaaaagcattagaaggcgatgctgaatacgaacaaaaaatcttagacttaatgcaagcagttgatgattacattccaactccagaacgtgattctgacaaaccattcatgatgccagttgaggacgtattctcaatcactggtcgtggtactgttgctacaggccgtgttgaacgtggtcaaatcaaagttggtgaagaagttgaaatcatcggtatgcacgaaacttctaaaacaactgttactggtgtagaaatgttccgtaaattattagactacgctgaagctggtgacaacatcggtgctttattacgtggtgttgcacgtgaagacgtacaacgtggtcaagtattagctgctcctggttctattacaccacacacaaaattcaaagctgaagtatacgtattatctaaagatgaaggtggacgtcacactccattcttcactaactatcgcccacaattctatttccgtactactgacgtaactggtgttgtaaacttaccagaaggtacagaaatggttatgcctggcgacaacgttgaaatgacagttgaattaatcgctccaatcgctatcgaagacggaa

SEQ ID NO: 612 - DNA, 825 bp, Salmonella choleraesuis subsp. choleraesuis
  ref <308>: DATABASE ACCESSION NUMBER: ATCC 9150
ggcgcgatcctggttgttgctgcgactgacggcccgatgccgcagacccgtgagcacatcctgctgggtcgtcaggtaggcgttccgtacatcatcgtgttcctgaacaaatgcgacatggttgatgacgaagagctgctggaactggttgaaatggaagttcgtgaacttctgtctcagtacgacttcccgggcgacgacacgccgatcgttcgtggttctgctctgaaagcgctggaaggcgacgcagagtgggaagcgaaaatcatcgaactggctggcttcctggattcttacatcccggaaccagagcgtgcgattgacaagccgttcctgctgccgatcgaagacgtattctccatctccggtcgtggtaccgttgttaccggtcgtgtagaacgcggtatcatcaaagtgggcgaagaagttgaaatcgttggtatcaaagagactcagaagtctacctgtactggcgttgaaatgttccgcaaactgctggacgaaggccgtgccggtgagaacgtaggtgttctgctgcgtggtatcaaacgtgaagaaatcgaacgtggtcaggtactggctaagccgggcaccatcaagccgcacaccaagttcgaatctgaagtgtacattctgtccaaagatgaaggcggccgtcatactccgttcttcaaaggctaccgtccgcagttctacttccgtactactgacgtgactggcaccatcgaactgccggaaggcgtagagatggtaatgccgggcgacaacatcaaaatggttgttaccctgatccacccgatcgcaatggacgacggtctgcgtttc

SEQ ID NO: 613 - DNA, 778 bp, Serratia ficaria
  ref <308>: DATABASE ACCESSION NUMBER: ATCC 33105
ggcgctatcctggttgttgctgcgactgacggcccaatgcctcagacccgtgagcacatcctgctgggtcgycaggttggcgttcctttcatcatcgtrttcatgaacaaatgcgacatggttgatgatgaagagctgctggaactggtagaaatggaagttcgcgaactgctgtccgcttacgacttccctggcgatgacctgccggtgattcgcggttccgcgctgaaagcgctggaaggcgaagccgagtgggaagctaaaatcatcgagctggctgamcmsctggatacttacatcccagaaccagagcgcgctatcgacaagccgttcctgctgccaatcgaagacgtattctccatctccggtcgtggtaccgtggttaccggtcgtgttgagcgcggtatcatcaaagttggcgaagaagttgaaatcgttggtatcaaagacaccgtcaagtctacctgtaccggcgttgaaatgttccgcaaactgctggacgaaggccgtgccggtgagaacgtaggtgttctgctgcgtggtatcaagcgtgaagacatcgaacgtggtcaggttctggctaaaccaggttccatcaagccgcacacccagttcgattcagaagtgtacatcctgagcaaagaagaaggtggtcgtcacackccattcttcaaaggctaccgtccacagttctacttccgtactactgacgtgaccggtaccatcgaactgccagaaggcgttgagatggtaatgcctggcgacaacgtgaacatga

SEQ ID NO: 614 - DNA, 653 bp, Enterococcus malodoratus
  ref <308>: DATABASE ACCESSION NUMBER: ATCC 43197
gtgcgatcttagtagtatcagctactgatggtccaatgcctcaaactcgtgaacacattttgttatcacgtcaagttggtgttaagcacttgatcgttttcttgaacaaagtagatttagttgatgacgaagaattgatcgacttagttgaaatggaagtacgtgaattactttctgaatatggtttcccaggtgatgatattccagtgcttaaaggttctgctttgaaagcattagaaggcgatccagaacaagaacaagttattcttgatttgatggataccgttgatgaatatatcccaacacctgaacgtgacaatgacaaaccgttcttgttaccagttgaggatgttttctcgatcacaggacgtggtactgtagcttctggtcgtatcgaccgtggcgaagttaaagtcggcgatgaaattgaaatcatcgggatcaaacctgaagttcaaaaagcaatcgttactggacttgaaatgttccgtaaaacattggattatggtgaagctggcgataacgttggggttctattacgtgggattacacgtgatgaaatcgaacgtggccaagtattagctaaaccaggttcaatcacaccacatactaagttcaaagccgaagtatatgtgttgacgaaagaagaaggt

SEQ ID NO: 615 - DNA, 829 bp, Enterococcus durans
  ref <308>: DATABASE ACCESSION NUMBER: ATCC 19432
ccattctagttgtatctgcaacagatggaccaatgccacaaacacgtgaacatattttattgtcacgtcaagtaggtgttaaatatttgatcgtcttcttgaacaaaatcgacttagtagatgatgaagaattgattgatcttgtcgaaatggaagttcgtgaattattaagcgaatatggtttcccaggtgacgatacaccagtcatcaaaggttcagcattaaaagctttacaaggagatcctgatgcagaagcagctatcatggaattgatggatactgttgatgaatatatcccaacaccagaacgtgatacagacaaaccattattgttaccagtggaagatgtcttctcaatcacaggtcgtgggactgttgcttcaggtcgtatcgatcgtggtgcagttcgtgtaggtgatgaaatcgaaatcgtcggtatcaaacctgaaacacaaaaagctgttgtaactggggtcgaaatgttccgcaagacattagactatggtgaagcaggagataacgttggggtattgttacgtggtatccaacgtgaagatatcgaacgtggacaagtaatcgcaaaaccaggttcaatcacaccacatacaaaattcaaagcagaagtgtacgtattgacaaaagaagaaggtggacgtcatacaccattcttcaataactatcgtccacaattctacttccgtacaactgacgtaactggaacaatcgttttacctggaggcactgaaatggttatgcctggagataacgtaacgatcgacgttgaattgatccatccagttgccatcgaaaacggaacaactttctctat

SEQ ID NO: 616 - DNA, 669 bp, Enterococcus pseudoavium
  ref <308>: DATABASE ACCESSION NUMBER: ATCC 49372
ggtgcaattttagtagtatctgctactgatggcccaatgccacaaacacgtgaacatatcttgttatcacgtcaagtaggggttaaacacttaatcgtcttcttgaacaaagttgatttagttgatgatgaagaattgatcgatttagttgaaatggaagttcgggaattgctttctgaatatggtttcccaggcgatgatattccagtacttaaaggttctgctttgaaagctttagaaggcgatcctgaacaagaacaagtaatccttgacttgatggatacggttgatgaatacatcccaacgcctgaacgtgatactgacaaaccattcttgttaccagtcgaagatgtcttctcaatcacaggacgtggtacggttgcatctggtcgtatcgatcgtggggaagttaaagtcggtgatgaagttgaaatcatcgggatcaaacctgaagtgcaaaaagctgtcgtaactggactagaaatgttccgtaagacattggattacggtgaagctggcgataacgttggggttctattacgtgggattactcgtgatgaaatcgaacgtggacaagtattagctaaaccaggttcaatcactccacatacgaaattcagtgcagaagtttatgtattgacgaaagaagaaggtggccgtcatacgcca

SEQ ID NO: 617 - DNA, 835 bp, Enterococcus dispar
  ref <308>: DATABASE ACCESSION NUMBER: ATCC 51266
cggggcaattttagttgtatctgcaactgatggcccaatgccacaaacacgtgaacacattttgttagctcgtcaagtaggggttaaatatttaatcgtcttcttgaacaaaacagatttagttgatgatgaagaattattggaactagttgaaatggaagttcgtgaattattaaatgaatacaatttccctggcgatgatattcctgttattcgcggatctgctttaaaagcattagaaggcgatccagaacaagaagaagtaattatgaacttgatggatactgtggatgaatatatcccaactccagaacgtgacaatgataaaccattcttgttaccagtggaagatgtcttcacaattactggtcgtggtactgttgcttcaggtcgtatcgaccgtggtaaagtcaacgttggtgatgaaattgaaattatcggaattaaaccagaaacacaaaaagctgttgtaaccggtttggaaatgttccgtaaaactttggattatggtgaagctggtgataacgttggggtcttattacgtgggattactcgtgatgaagtagaacgtggtcaagtattagcaaaaccaggttccattacaccgcataccaaatttaaaggtgaagtttatatcttaacaaaagaagaaggtggacgtcatactcctttctttaataactatcgtcctcaattttatttccgtacaactgatgtgactggtaacatcgcattacctgaaggaactgaaatggtaatgcctggtgataatgtaacaattgaagttgaattgattcatccaatcgccgttgaaaaagggactactttctcaatt

SEQ ID NO: 618 - DNA, 673 bp, Enterococcus avium
  ref <308>: DATABASE ACCESSION NUMBER: ATCC 14025
ggtgcaatcctagtagtatcagctactgatggtccaatgccgcaaacacgtgaacatattttgctatcacggcaagtgggtgttaaacacttaatcgtatttttaaacaaagttgatttagtcgatgatgaagaattgatcgatctagttgaaatggaagtccgtgaattactttctgaatatggtttcccaggtgacgatattccagttctcaaaggttcagctttgaaagcattagaaggcgatcctgaacaagaacaagtaatccttgatttaatggatacagttgacgaatatatcccaactccagaacgtgacactgacaagccattcttgttaccagtcgaagatgtattttctatcactggtcgtgggactgtagcgtctggacggattgatcgtggtgaagttaaagtcggcgatgaagttgaaatcatcgggatcaaacctgaaattcaaaaagcagtcgtaactggacttgaaatgttccgtaaaactttagattatggtgaagctggcgataacgttggggttctattacgtgggattacacgtgatgaaatcgaacgtggtcaagtcttagctaaaccaggttcaatcacaccacatacaaaattcagtgcagaagtttacgtattgacgaaagaagaaggtggacgtcatacaccatctt

SEQ ID NO: 619 - DNA, 1713 bp, Saccharomyces cerevisiae
tttcatatttttaaggattttgttttagcacccatccgacctcagtcaatatatcctttcgcgaccaggctttcctcccttttgctgctaactggttacagattttcctatttttggtcatttttatctttgaaactgattaagctgaaaaaatttgagcttctttgttgtaaactattttgtgctttcagttttattctagctcgacaaaggtaacagacaaaaatgtcagctttattaccaagattactcacaagaacagcttttaaagcttctgggaaacttctgaggctctcttcagtaatttctaggaccttttctcaaactactacttcctatgcagctgcttttgatcgttccaaaccgcatgtaaatataggtacgatcggccatgttgatcatgggaagacaactttaaccgcagccattacgaaaacgttagccgcaaaaggtggtgccaacttcttggactatgctgccatcgataaggctccggaagaaagagctcgtggtattacaatttctactgcacacgtggaatacgaaacggccaagagacattattctcacgtcgactgtccaggccacgctgattacatcaagaatatgattaccggtgctgctcaaatggatggtgctatcattgttgtagctgctaccgatggacaaatgccccaaactagagaacatttacttttggccagacaagttggtgtccaacatattgtcgtttttgttaacaaggttgataccattgatgatccagaaatgttagagttagtcgaaatggaaatgagagaacttttaaacgaatatgggtttgacggtgataatgctccaattatcatgggttctgccctttgcgctttggaaggtcgccaacctgaaattggggagcaggccatcatgaaacttttggatgcagtggatgagtatattcctacacctgaaagagatttgaacaagcctttcttgatgcccgttgaagatatcttctctatctccggtagaggtactgtggtcactggtcgtgtggaaaggggtaatttaaagaaaggtgaggaattggaaattgttggtcacaactccaccccattgaaaacaacagttactggtattgaaatgtttagaaaggaattggactctgctatggcaggtgacaatgccggtgttttacttagaggtatcaggagagatcaattgaagagaggtatggtcttagctaagccaggtaccgttaaagcccatacaaagattctagcctctttgtacattttatccaaagaggaaggtggtagacattctgggtttggtgaaaactacagaccacaaatgtttataagaacagctgatgttacagttgtgatgagatttcctaaggaggttgaagatcattctatgcaagttatgccaggtgacaatgttgaaatggaatgtgatttgatccatcctaccccattagaagttggtcaacgtttcaatatcagagagggtggaagaactgttggtaccggtctaatcacacgtattattgaatagacttattgatgcaactggagtatatttctatatattctgttcatttcccctctcataatatatacttgtttcgttaaaattttatacgtgtaaataaagtgccataaatttttcagctttacttttggtagagtcctgctagcactagattttacaatttcatgtgcacacacc

SEQ ID NO: 620 - DNA, 18 bp, Artificial Sequence
  Synthetic DNA Sequence
attggtgcattgctacgt

SEQ ID NO: 621 - DNA, 751 bp, Enterococcus faecium
  ref <308>: DATABASE ACCESSION NUMBER: ATCC 19434
tggtgcaatcttagttgtttctgcaactgacggtccgatgcctcaaacacgtgaacacattttattgtcacgccaagttggtgtaaaatacctgattgttttcttgaacaaagttgatttagtcgatgatgaagaattgatcgatttggtagaaatggaagttcgcgagttattgagcgaatatggtttcccaggcgatgacactcctgtgatcaaaggttccgcattaaaagcattgcaaggcgatccagatgctgaagctgctattatggaattgatggatacagtagatgaatatatcccaacaccagaacgtgatacagataaaccattactattgccagtggaagacgtcttctcaattacaggtcgaggaactgttgcctcaggtcgtattgatcgtggtgctgttcgtgtcggtgatgaggtagagatcgtagggatcaaacctgaaacacaaaaagcagttgtaacaggtgtagaaatgttccgtaaaacgttagattacggggaagctggggataacgtaggcgtgttgttacgggggatccaacgtgacgatatcgaacgtggacaagtacttgctaaaccaggttccattactccacatacaaaattcaaagcagaagtgtacgtgttgacaaaagaagaaggtggacgtcatactccattcttcaacaactatcgtccacagttctacttccgcacaactgatgttacaggaacaatcacattgccagaagatacagaa

SEQ ID NO: 622 - DNA, 750 bp, Saccharomyces cerevisiae
  ref <308>: DATABASE ACCESSION NUMBER: ATCC 13264
gtcaaatgggacgaatccagattccaagaaattgtcaaggaaacctccaactttatcaagaaggttggttacaacccaaagactgttccattcgtcccaatctctggttggaacggtgacaacatgattgaagctaccaccaacgctccatggtacaagggttgggaaaaggaaaccaaggccggtgtcgtcaagggtaagactttgttggaagccattgacgccattgaacaaccatctagaccaactgacaagccattgagattgccattgcaagatgtttacaagattggtggtattggtactgtgccagtcggtagagttgaaaccggtgtcatcaagccaggtatggttgttactttcgccccagctggtgttaccactgaagtcaagtccgttgaaatgcatcacgaacaattggaacaaggtgttccaggtgacaacgttggtttcaacgtcaagaacgtttccgttaaggaaatcagaagaggtaacgtctgtggtgacgctaagaacgatccaccaaagggttgcgcttctttcaacgctaccgtcattgttttgaaccatccaggtcaaatctctgctggttactctccagttttggattgtcacactgctcacattgcttgtagattcgacgaattgttggaaaagaacgacagaagatctggtaagaagttggaagaccatccaaagttcttgaagtccggtgacgctgctttggtcaagttcgttccatctaagcca

SEQ ID NO: 623 - DNA, 1269 bp, Cryptococcus neoformans
  ref <308>: DATABASE ACCESSION NUMBER: ATCC 44104
tcttgaaagcttaaggccgagcgagagcgaggtatcaccatcgacattgctctttggaagttcgagacccccaggtaccaggtcaccgtcattgacgcccccggtcaccgagacttcatcaagaacatgatcaccggtacctcccaggctgactgtgccatcctcatcattgccaccggtatcggtgagttcgaggccggtatctccaaggacggtcagacccgagagcacgccctcctcgccttcaccctcggtgtcaggcagctcattgttgcttgcaacaagatggacacctgcaagtggtccgaggaccgattcaacgaaatcgtcaaggagaccaacggtttcatcaagaaggttggttacaaccccaaggctgtccccttcgtccccatctctggttggcacggtgacaacatgttggaggagaccaccaagtcagtgaatccgcttctacgtgatgagatgtttttctgactttccgtgcagcatgccctggtacaagggatggaccaaggagaccaagtctggtgtttccaagggtaagaccctcctcgaggccatcgacgccatcgagccccctacccgacccaccgacaagcccctccgtctccctctccaggacgtctacaagatcggtggtatcggcacagtccctgtcggccgagtcgagaccggtgtcatcaaggccggtatgttgtctcatctctcttgtctcgtaacatgcgtctcgtaacatgcgcttacttcattttcaggtatggtcgtcaagttcgcccccaccaacgtcaccactgaagtcaagtccgttgagatgcaccacgagcagatccccgagggtcttcccggagacaacgttggtttcaacgtcaagaacgtttccatcaaggacatccgacgaggtaacgtctgtggtgactccaagaacgacccccctatggaggctgcttctttcaacgcccaggttatcgtccttaaccaccctggtcagatcggtgccggttacacccccgttctcgactgtcacactgcccgtaagcctgacccaatacctccaacatacctttgaagctgaccctttctagacattgcctgcaagtttgctgagttgatcgagaagattgaccgacgaaccggtaaggtcatggaggccgcccccaagttcgtcaagtctggtgacgccgccattgtcaagcttgttgcccagaagcccctctgtgttgagacctacgccgactacccccctcttggtcgattcgccgtccgaga

SEQ ID NO: 624 - DNA, 753 bp, Candida albicans
  ref <308>: DATABASE ACCESSION NUMBER: ATCC 36801
tctgtcaaatgggacaaaaacagatttgaagaaatcatcaaggaaacctccaacttcgtcaagaaggttggttacaacccaaagactgttccattcgttccaatctctggttggaatggtgacaacatgattgaaccatccaccaactgtccatggtacaagggttgggaaaaggaaaccaaatccggtaaagttactggtaagaccttgttagaagctattgacgctattgaaccaccaaccagaccaaccgacaaaccattgagattgccattgcaagatgtttacaagatcggtggtattggtactgtgccagtcggtagagttgaaactggtatcatcaaagccggtatggttgttactttcgccccagctggtgttaccactgaagtcaaatccgttgaaatgcatcacgaacaattggctgaaggtgttccaggtgacaatgttggtttcaacgttaagaacgtttccgttaaagaaattagaagaggtaacgtttgtggtgactccaagaacgatccaccaaagggttgtgactctttcaatgcccaagtcattgttttgaaccatccaggtcaaatctctgctggttactctccagtcttggattgtcaccctgcccacattgcttgtaaattcgacactttggttgaaaagattgacagaagaactggtaagaaattggaagaaaatccaaaattcgtcaaatccggtgatgctgctatcgtcaagatggtcccaaccaaacca

SEQ ID NO: 625 - DNA, 26 bp, Artificial Sequence
  Synthetic DNA Sequence
cgttgaagacacgacccaaagtatcc

SEQ ID NO: 626 - DNA, 26 bp, Artificial Sequence
  Synthetic DNA Sequence
taccaccttttaagtaaggtgctaat

SEQ ID NO: 627 - DNA, 26 bp, Artificial Sequence
  Synthetic DNA Sequence
attgtctataaaaatggcgataagtc

SEQ ID NO: 628 - DNA, 26 bp, Artificial Sequence
  Synthetic DNA Sequence
aaaatggcgataagtcacaaaaagta

SEQ ID NO: 629 - DNA, 25 bp, Artificial Sequence
  Synthetic DNA Sequence
aagttccatctcaacaaggtcaata

SEQ ID NO: 630 - DNA, 22 bp, Artificial Sequence
  Synthetic DNA Sequence
cggagctatcctagtcgtttca

SEQ ID NO: 631 - DNA, 26 bp, Artificial Sequence
  modified_base (13): i
  Synthetic DNA Sequence
cagaccaacyganaarccattragat

SEQ ID NO: 632 - DNA, 23 bp, Artificial Sequence
  Synthetic DNA Sequence
ccctttggtggrtcstkcttgga

SEQ ID NO: 633 - DNA, 26 bp, Artificial Sequence
  modified_base (13): i
  modified_base (19): i
  Synthetic DNA Sequence
cagaccaacyganaarccnttragat

SEQ ID NO: 634 - DNA, 26 bp, Artificial Sequence
  modified_base (15): i
  Synthetic DNA Sequence
aacacygtcagrrcnattgcyatgga

SEQ ID NO: 635 - DNA, 26 bp, Artificial Sequence
  modified_base (9): i
  modified_base (21): i
  Synthetic DNA Sequence
aaaccrgtnarrgcractctngctct

SEQ ID NO: 636 - DNA, 23 bp, Artificial Sequence
  Synthetic DNA Sequence
  modified_base (12): i
actggygttganatgttccgyaa

SEQ ID NO: 637 - DNA, 23 bp, Artificial Sequence
  Synthetic DNA Sequence
  modified_base (9): i
acgtcagtngtacggaartagaa

SEQ ID NO: 638 - DNA, 26 bp, Artificial Sequence
  Synthetic DNA Sequence
  modified_base (15): i
ccaatgccacaaacncgtgarcacat

SEQ ID NO: 639 - DNA, 28 bp, Artificial Sequence
  Synthetic DNA Sequence
  modified_base (25): i
tttacggaacatttcwacaccwgtnaca

SEQ ID NO: 640 - DNA, 23 bp, Artificial Sequence
  Synthetic DNA Sequence
  modified_base (9): i
  modified_base (15): i
tccatggtntwyggncaratgaa

SEQ ID NO: 641 - DNA, 26 bp, Artificial Sequence
  Synthetic DNA Sequence
  modified_base (12): i
  modified_base (15): i
  modified_base (18): i
tgataaccwacngcnganggcatacg

SEQ ID NO: 642 - DNA, 23 bp, Artificial Sequence
  Synthetic DNA Sequence
  modified_base (6): i
  modified_base (9): i
  modified_base (15): i
  modified_base (18): i
ggcgtnggngarcgnacncgtga

SEQ ID NO: 643 - DNA, 23 bp, Artificial Sequence
  Synthetic DNA Sequence
  modified_base (6): i
  modified_base (9): i
actggngtngaratgttccgyaa

SEQ ID NO: 644 - DNA, 23 bp, Artificial Sequence
  Synthetic DNA Sequence
  modified_base (6): i
  modified_base (9): i
  modified_base (12): i
acgtcngtngtnckgaartagaa

SEQ ID NO: 645 - DNA, 23 bp, Artificial Sequence
  Synthetic DNA Sequence
  modified_base (6): i
  modified_base (9): i
  modified_base (12): i
acgtcngtngtnckgaartaraa

SEQ ID NO: 646 - DNA, 23 bp, Artificial Sequence
  Synthetic DNA Sequence
  modified_base (12): i
  modified_base (18): i
atcgacaagccnttcytnatgsc

SEQ ID NO: 647 - DNA, 26 bp, Artificial Sequence
  Synthetic DNA Sequence
acgtccgtsgtrcggaagtagaactg

SEQ ID NO: 648 - DNA, 26 bp, Artificial Sequence
  Synthetic DNA Sequence
acgtcsgtsgtrcggaagtagaactg

SEQ ID NO: 649 - DNA, 26 bp, Artificial Sequence
  Synthetic DNA Sequence
  modified_base (20): i
gtcctatgcctcaracwcgngagcac

SEQ ID NO: 650 - DNA, 23 bp, Artificial Sequence
  Synthetic DNA Sequence
  modified_base (21): i
ttacggaacatytcaacaccngt

SEQ ID NO: 651 - DNA, 25 bp, Artificial Sequence
  Synthetic DNA Sequence
  modified_base (12): i
tgacgaccaccntcytcyttyttca

SEQ ID NO: 652 - DNA, 27 bp, Artificial Sequence
  Synthetic DNA Sequence
  modified_base (9): i
  modified_base (12): i
  modified_base (15): i
  modified_base (24): i
ccwayagtnyknccnccytcyctnata

SEQ ID NO: 653 - DNA, 20 bp, Artificial Sequence
  Synthetic DNA Sequence
  modified_base (9): i
gayttcatnaaraayatgat

SEQ ID NO: 654 - DNA, 20 bp, Artificial Sequence
  Synthetic DNA Sequence
  modified_base (12): i
tacaaratykgnggtatygg

SEQ ID NO: 655 - DNA, 20 bp, Artificial Sequence
  Synthetic DNA Sequence
  modified_base (9): i
ccrataccncmratyttgta

SEQ ID NO: 656 - DNA, 22 bp, Artificial Sequence
  Synthetic DNA Sequence
aattaatggctgcagttgayga

SEQ ID NO: 657 - DNA, 22 bp, Artificial Sequence
  Synthetic DNA Sequence
ttgtccacgttcgatrtcttca

SEQ ID NO: 658 - DNA, 23 bp, Artificial Sequence
  Synthetic DNA Sequence
gatytagtcgatgatgaagaatt

SEQ ID NO: 659 - DNA, 23 bp, Artificial Sequence
  Synthetic DNA Sequence
  modified_base (9): i
gctttttgngtttcwggtttrat

SEQ ID NO: 660 - DNA, 23 bp, Artificial Sequence
  Synthetic DNA Sequence
gtagaattgaggacggtagttag

SEQ ID NO: 661 - DNA, 23 bp, Artificial Sequence
  Synthetic DNA Sequence
gtagaaytgtggwcgatarttrt

SEQ ID NO: 662 - DNA, 832 bp, Corynebacterium diphtheriae
  ref <308>: DATABASE ACCESSION NUMBER: ATCC 27010
cggcgcaatcctcgttgttgctgccaccgacggcccaatgcctcagacccgtgagcacgttctgctcgctcgccaggtcggcgttccttacatcctcgttgctctgaacaagtgcgacatggttgatgatgaggaaatcatcgagctcgtcgagatggagatccrtgagctgctcgctgagcaggattacgacgaagaggctccaatcatccacatctccgcactgaaggctcttgagggcgacgagaagtggacccagtccatcatcgacctcatgcaggcttgckatgattccatcccagacccagagcgtgagaccgacaagccattcctcatgcctatcgaggacatcttcaccatcaccggccgcggtaccgttgttaccggccgtgttgagcgtggctccctgaaggtcaacgaggacgtcgagatcatcggtatccgcgagaakgctaccaccaccaccgttaccggtatcgagatgttccgtaagcttctcgactacaccgaggctggcgacaactgtggtctgcttctccgtggcgttaagcgcgaagacgttgagcgtggccaggttgttgttaagccaggcgcttacacccctcacaccgagttcgagggctctgtctacgttctgtccaaggacgagggtggccgccacaccccattcttcgacaactaccgcccacagttctacttccgcaccaccgacgttaccggtgttgtgaagcttcctgagggcaccgagatggtcatgcctggcgacaacgtcgacatgtccgtcaccctgatccagcctgtcgctatggatgagggcctgcgcttcgctatc

SEQ ID NO: 663 - DNA, 1192 bp, Candida catenulata
  ref <308>: DATABASE ACCESSION NUMBER: ATCC 10565
aacggcgagcaagacttggtgttggaggtttctcagcacttgggtgagaacaccgtgcgtaccattgccatggacggtaccgagggtttggtgagaggtaccgctgtcactgacaccggtgctcccatctcggtccccgttggtcagggtaccttgggccggatcatcaacgttgtcggtgagcccatcgacgagcgtggtcccatccagtgcaagcagagaaaccccattcacgccgagcccccgtctttcaccgagcagtccgtcgaggctgaggtgttggagaccggtatcaaggttgtcgacttgttggctccctacgcccgtggtggtaagattggtcttttcggtggtgccggtgtcggtaagaccgtgttcatccaggagttgattaacaacattgccaaggcccacggtggtttctccgtgttcactggtgtcggtgagcgtactcgtgagggtaacgacttgtaccgtgaaatgaaggagaccggtgtcatcaacttggagggcgactccaaggtggccttggtgttcggtcagatgaacgagcccccgggggctcgtgcccgtgtcgccttgaccggtttgaccattgccgagtacttccgtgacgaggaaggccaggacgtgttgttgttcgttgacaacattttcagattcacccaggccggttccgaggtgtcggcgttgttgggtcgtatcccctccgccgtcggttaccagcccactttggccaccgacatgggtttgttgcaggagagaattaccaccaccaagaagggttccgtcacctctgtgcaggccgtgtacgtccctgccgatgacttgactgaccctgcccccgccaccactttcgctcacttggacgccaccaccgtgttgtcgcgtggtatctccgagttgggtatctaccccgccgtcgaccccttggactccaagtcgagattgttggacgtcgaggttgttggccaggagcactacgacgtcgccaccggtgtccaggagtgcttgcaggcctacaagtcgttgcaggacatcattgccattttgggtatggacgagttgtccgagcaggacaagttgaccgtcgagagagcccgtaagatccagcgtttcttgtcgcagcccttcgctgtcgccgaggttttcactggtatccccggtagattggtgagattgcaggacaccg

SEQ ID NO: 664 - DNA, 29 bp, Artificial Sequence
  Synthetic DNA Sequence
  modified_base (9): i
  modified_base (12): i
  modified_base (15): i
  modified_base (18): i
  modified_base (21): i
aayatgatnacnggngcngcncaratgga

SEQ ID NO: 665 - DNA, 1377 bp, Saccharomyces cerevisiae
atgggtaaagagaagtctcacattaacgttgtcgttatcggtcatgtcgattctggtaagtctaccactaccggtcatttgatttacaagtgtggtggtattgacaagagaaccatcgaaaagttcgaaaaggaagccgctgaattaggtaagggttctttcaagtacgcttgggttttggacaagttaaaggctgaaagagaaagaggtatcactatcgatattgctttgtggaagttcgaaactccaaagtaccaagttaccgttattgatgctccaggtcacagagatttcatcaagaacatgattactggtacttctcaagctgactgtgctatcttgattattgctggtggtgtcggtgaattcgaagccggtatctctaaggatggtcaaaccagagaacacgctttgttggctttcaccttgggtgttagacaattgattgttgctgtcaacaagatggactccgtcaaatgggacgaatccagattccaagaaattgtcaaggaaacctccaactttatcaagaaggttggttacaacccaaagactgttccattcgtcccaatctctggttggaacggtgacaacatgattgaagctaccaccaacgctccatggtacaagggttgggaaaaggaaaccaaggccggtgtcgtcaagggtaagactttgttggaagccattgacgccattgaacaaccatctagaccaactgacaagccattgagattgccattgcaagatgtttacaagattggtggtattggtactgtgccagtcggtagagttgaaaccggtgtcatcaagccaggtatggttgttacttttgccccagctggtgttaccactgaagtcaagtccgttgaaatgcatcacgaacaattggaacaaggtgttccaggtgacaacgttggtttcaacgtcaagaacgtttccgttaaggaaatcagaagaggtaacgtctgtggtgacgctaagaacgatccaccaaagggttgcgcttctttcaacgctaccgtcattgttttgaaccatccaggtcaaatctctgctggttactctccagttttggattgtcacactgctcacattgcttgtagattcgacgaattgttggaaaagaacgacagaagatctggtaagaagttggaagaccatccaaagttcttgaagtccggtgacgctgctttggtcaagttcgttccatctaagccaatgtgtgttgaagctttcagtgaatacccaccattaggtagattcgctgtcagagacatgagacaaactgtcgctgtcggtgttatcaagtctgttgacaagactgaaaaggccgctaaggttaccaaggctgctcaaaaggctgctaagaaataa

SEQ ID NO: 666 - DNA, 1536 bp, Saccharomyces cerevisiae
atggttttgccaagactatatactgctacatcccgtgctgcttttaaagcagccaaacaatccgctccgcttctatccacttcgtggaaaagatgtatggcctcagctgctcaatctactccaatcaccggtaaagttaccgctgtcattggtgccattgttgacgttcattttgaacaatcagagttgcccgctattttgaacgctttagaaattaaaacacctcaaggtaagttggttttggaagttgctcaacatttgggtgaaaacactgtcagaaccattgctatggatggtaccgaaggtttggtccgtggtgaaaaggttcttgacactggtggccctatctccgtcccagttgggagagaaactttagggagaatcatcaacgttatcggtgaacctattgatgaaagaggtccaattaagtccaaactaagaaagccaattcacgcagaccctcctagttttgcagaacaatctacttcggctgaaattttggaaacaggtatcaaagtcgtcgatctattagctccttatgccagaggtggtaagattggtcttttcggtggtgcaggtgtcggtaagactgtgttcattcaagaattgattaacaatatcgccaaggcccatggtggtttttccgttttcgccggtgttggtgaaaggaccagagagggtaatgacttgtaccgtgaaatgaaggaaactggagtcattaacttggaaggtgaatccaaggtcgccttagttttcggtcaaatgaacgaacctccaggagccagagccagagtcgctttaactggtttgacgatcgctgaatatttcagagatgaagaaggtcaagacgtcttgttgtttatcgacaatatctttagatttactcaagctggttcagaagtctctgcccttttgggtcgtattccatctgccgtcggttatcaaccaactttggccactgatatgggtctcttacaagaaagaattaccaccacaaagaagggttctgtcacttctgtgcaagccgtttatgttccagccgatgatttaacagatccgtctccgtccacatcttttgcccatttggacgcatcatccgtcttgtcaagaggtatttcagaattaggtatttaccctgcagtggatccattggattctaaatcaaggttattggatgccgccgttgtcggtcaagaacattatgacgtcgcctccaaggttcaagaaactttacagacctataaatctttacaagatatcattgctattttgggtatggatgaattgtccgaacaagataaactaactgtcgaaagggcaagaaagattcaaagattcttatctcaaccatttgctgtcgccgaagtctttactggtatcccaggtaaattagtgagattaaaggacaccgttgcctcgttcaaagccgttttggaaggtaaatacgataatataccagaacatgctttctatatggttggtggtattgaagatgttgttcgtaaagctgaaaagttagcccgtgaagccaactag

SEQ ID NO: 667 - DNA, 1293 bp, Trypanosoma cruzi
  strain Y
cggaaggcgtgccgccggtgttaactgctttggatgtggtggaaaaacttggccgtgacgagcccttgacacttgaaattgtacagcacttggacgcccacaccggccgttgcattgcgatgcagacgacagatctgcttaagctgaaatcgaaggtagtctcgagtggcgggaacatttctgtgcctgtgggtcgggagacacttggcagaatcttcaatgtgctgggcgatgccattgaccagcgcggccatgttggagagaagcaacgcatgcctattcacgctgtggcaccaaagttggcggatcaggcggcagaggacaccattctcacaacgggtatcaaggtgattgatctgattttgccctactgcaagggtgggaagattggtctttttggtggtgctggcgtgggcaagacggttattatcatggaacttattaacaacgttgccaagggccatggtgggttctccgtctttgcgggtgttggtgaacgcacgcgtgaggggacggatctttacctggagatgatgcaatccaaagttattgacctgaagggtgactcgaagtgtgtgttggtgtatggtcagatgaacgagcctccgggtgcccgtgctcgtgtggcgcagtctgccttgacaatggccgagtacttccgtgatgtggaagggcaagacgtgttgctttttatcgacaacattttccgctttacgcaggcaaactctgaggtgtcagcgctgttgggtcgtattcccgctgccgtcggctaccagcctacccttgctgaggatcttgggcagttgcaggagcgcattacgtccacgacaaaaggttccattacctctgtgcaggctgtgtacgtgccagccgatgatattaccgaccctgcgccagcaacgaccttttcccacctcgatgccacgacggtgctggaccgtgccgttgccgaatccggcatttaccccgctgtcaacccactggagtgtgcctcgcgtatcatggacccggatgtaatcagcgttgaccactacaacgtggcgcaggatgtggtgcagatgcttaccaagtacaaggagctgcaggatatcattgcggtgcttggcattgatgagctcagtgaggaggataaacttatcgtggaccgtgcgcgtaaggtgacaaagtttctctcccagcctttccaggtggcggaggtgtttactggcatgacaggccactacgtgcagctggaggagaccattgagtctttttccggcctgttgatgggcacatatgatcaggtgccggaga

SEQ ID NO: 668 - DNA, 1191 bp, Corynebacterium glutamicum
gtggcaaaggcgaagttcgagcgtaccaagccccacgtaaacatcggcaccatcggtcacgttgaccacggtaagaccaccaccaccgcggctatcaccaaggttctggctgacacttaccctgagctcaacgaggctttcgccttcgactccatcgataaggctcctgaggagaaggagcgtggcatcacgatcaacatctcccacgttgagtaccagactgaaaagcgccactacgcacacgttgacgctccaggccacgccgactacatcaagaacatgattaccggcgctgctcagatggacggcgcaatcctcgttgttgctgctaccgacggcccaatgcctcagacccgtgagcacgttcttcttgctcgccaggttggcgttccttacatcctcgttgctcttaacaagtgcgacatggttgaggatgaggaaatcatcgagctcgtcgagatggaagttcgtgaacttcttgctgagcaggactacgacgaagaggctccaattgttcacatctccgctctgaaggctcttgagggcgacgagaagtggggcaagcagatccttgagctcatgcaggcttgcgatgacaacatccctgacccagttcgtgagaccgacaagccattcctcatgcctatcgaggacatcttcaccatcaccggtcgtggcaccgttgttaccggtcgtgttgagcgcggtaccctgaacgtgaacgatgatgttgacatcatcggcatcaaggagaagtccacctccaccaccgttaccggtatcgagatgttccgtaagcttcttgactccgctgaggctggcgacaactgtggtctgcttctccgtggtatcaagcgcgaagatgttgagcgtggccaggttatcgttaagccaggcgcttacacccctcacaccgagttcgagggctctgtctacgttctgtccaaggatgaaggtggccgccacaccccattcttcgacaactaccgtcctcagttctacttccgcaccaccgacgttaccggtgttgtgaagcttccagagggcaccgagatggtcatgcctggcgacaacgtcgacatgtccgtcaccctgatccagcctgtcgctatggacgagggcctgcgtttcgctatccgcgaaggctcccgcaccgttggcgctggtcgtgtcaccaagatcatcaagtaa

SEQ ID NO: 669 - DNA, 1383 bp, Escherichia coli
atggctactggaaagattgtccaggtaatcggcgccgtagttgacgtcgaattccctcaggatgccgtaccgcgcgtgtacgatgctcttgaggtgcaaaatggtaatgagcgtctggtgctggaagttcagcagcagctcggcggcggtatcgtacgtaccatcgcaatgggttcctccgacggtctgcgtcgcggtctggatgtaaaagacctcgaacacccgattgaagtcccggtaggtaaagcgactctgggccgtatcatgaacgtactgggtgaaccggtcgacatgaaaggcgagatcggtgaagaagagcgttgggcgattcaccgcgcagcaccttcctacgaagagctgtcaaactctcaggaactgctggaaaccggtatcaaagttatcgacctgatgtgtccgttcgctaagggcggtaaagttggtctgttcggtggtgcgggtgtaggtaaaaccgtaaacatgatggagctcattcgtaacatcgcgatcgagcactccggttactctgtgtttgcgggcgtaggtgaacgtactcgtgagggtaacgacttctaccacgaaatgaccgactccaacgttatcgacaaagtatccctggtgtatggccagatgaacgagccgccgggaaaccgtctgcgcgttgctctgaccggtctgaccatggctgagaaattccgtgacgaaggtcgtgacgttctgctgttcgttgacaacatctatcgttacaccctggccggtacggaagtatccgcactgctgggccgtatgccttcagcggtaggttatcagccgaccctggcggaagagatgggcgttctgcaggaacgtatcacctccaccaaaactggttctatcacctccgtacaggcagtatacgtacctgcggatgacttgactgacccgtctccggcaaccacctttgcgcaccttgacgcaaccgtggtactgagccgtcagatcgcgtctctgggtatctacccggccgttgacccgctggactccaccagccgtcagctggacccgctggtggttggtcaggaacactacgacaccgcgcgtggcgttcagtccatcctgcaacgttatcaggaactgaaagacatcatcgccatcctgggtatggatgaactgtctgaagaagacaaactggtggtagcgcgtgctcgtaagatccagcgcttcctgtcccagccgttcttcgtggcagaagtattcaccggttctccgggtaaatacgtctccctgaaagacaccatccgtggctttaaaggcatcatggaaggcgaatacgatcacctgccggagcaggcgttctacatggtcggttccatcgaagaagctgtggaaaaagccaaaaaactttaa

SEQ ID NO: 670 - DNA, 1410 bp, Helicobacter pylori
  NCTC  11638
atgaaagcgatggaaggtaaaatcattcaggttttaggcccggtggtagatgtggagtttgaatcctatctgccggcgatttttgaagcactagacattaattttgaagttaatggcgttcaaaaatctttagttttagaggtggcagcccatttgggtggtaatcgggtgcgagcgattgctatggatatgacagaaggcttagtgcgtaaccaagccgtcaaagctcgtggcaaaatgattgaagtgcctgtgggcgaagaagtgttagggcgtatttttaatgttgtgggcgagagcattgataatttagagccgcttaagccgtccttaacttggcccattcacagaaaagcccctagttttgagcagcaaagcactaaaacagaaatgtttgaaaccggtattaaagtcattgacttgctcgcgccttattctaagggcggtaaagtaggcttgtttggtggggctggcgtaggcaaaacggtgatcattatggagcttatccacaatgtggcttataagcataacgggtattcggtgtttgcaggtgtgggggagcgcaccagagaagggaacgatctgtattttgagatgaaagaagggggcgttttagacaaagttgcgttgtgctatgggcaaatgaatgagccaccaggtgcaaggaatcgcatcgcattcaccggcttgacgatggcggagtatttccgtgatgaaaagggcttagatgtgttgatgtttattgataacatctttagatacgctcaaagcggtgcggaaatgagcgcgctattaggccgtatcccttcagcggtggggtatcagcccacgctagccggggaaatggggaaacttcaagagcgtatcgcttccactaaaaatggctctatcacttcggttcaagcggtgtatgtgccagcagacgacttgactgacccagcccctgcttcggtgtttgcgcatttagatgcgactacggtgttgaatagaaagatcgctgaaaaagggatttatccggcggtggatcctttggattccacttcaaggattttaagccctcaaatgattggcgagaagcactatgaaatcgccaccggtatccagcaagttttgcaaaaatacaaggatttgcaagatattattgcgattttgggattggacgaattgagcgaagaggataaaaaaacggttgaaagggccagaaaaattgagaagtttttatcccagccgttttttgtggctgaagtgtttacaggaagtcccggtaagtatgtgactctccaagagactttagagggctttggagggattttagagggcaaatacgatcacattcctgaaaacgcgttttacatggtgggcagcattcaagaggttttagaaaaagctaaaaacatgaaaaattcctaa

SEQ ID NO: 671 - DNA, 1401 bp, Clostridium acetobutylicum
  DSM 792
atgccagaacatgtaggtaaaattgttcaggtaataggacctgttgtggatattaaatttgatgcagagaaccttcctgacatctataattccatagaaatagatatgggagataataaaaaactcattgctgaagttgaacaacatgtaggagatgacatagtaagaacaatagcaatggaaggtactgacggattaaaaagaggaatggaagcagttaacactggtaaaccaatatctgtaccagttggagaaaatgttttaggacgtctttttaatgttttaggtcagacaatagatgaagcaggagacatgaatgctgataagtattatccaattcatagaccagctccaacctttgaagaacaatcagttcaaccagaaatgtttgaaacaggtattaaggttatagatttacttgctccatatcaaaagggtggaaaaatcggtttgttcggtggtgccggtgttggtaaaacagttcttattcaggaacttataaataatatagcaaaagaacacggtggattatcagtattcacaggtgttggagaaagaacaagagaaggtaatgacctttattatgaaatgaaagattcaggagttataaataaaacagctctagtatttggtcagatgaatgaaccacctggcgctagaatgagagttgctttaacaggacttacaatggctgaatattttagagacaaaggtcaagatgtgcttctatttatagataatatattcagatttacacaagctggttcagaggtttcagctttacttggtagaatacctagtgccgttggttatcagccaacacttgcaaatgaaatgggtgctcttcaagagagaataacatcaacaaaacagggttcaatcacatccgttcaggctgtatatgttcctgctgatgaccttacagacccagctccagcaacaacatttacgcatcttgatgcaacaacagttctttcaagagaaatatcaaacttaggaatatatcctgcagttagtcctcttgaatcaacttcaagaatacttgatccaagaattgttggagaagagcattatgaagttgctaacaaggttaaacatatacttgaaagatatcaagaacttcaagatatcatagctatacttggtgttgatgaactttcagatgaggatagattgttagttggaagagcaagaagagtacagagattcttatctcaagcttttagtgttgctgaacaatttacaggaatgaaaggtcagtttgtacctgtaaaagatactataagaagttttaaagaaatattagatggtaagtgtgatgatcttccagaagctgcatttttatttgcaggaacaatagaagatgtaaaagaaaaagctaaaaaaatgatggaaagctaa

SEQ ID NO: 672 - DNA, 1509 bp, Cytophaga lytica
  DSM 2039
atgtctaaagttacaggtaaagtttcccaaattattggcccagttatagatgtggagttccaagcaggggtagatcttccaaaaatttatgattcattagaaattaaaaaagcagatggatcaattttggttttggaagtacaatcacacattggtgagaacacagtaagaactatatctatggattcttctgatggtttaagtcgtggagcagaggttaatgcaacaggaagcgctatacaaatgccagttggagatgacgtttacggacgtttatttaacgtaattggagacgctattgatggtcttgggaatttaccaaaatctggtaaagatggtttgccaatacacagagaggcaccaaaatttgaagacttatctacttctacagaagtattatttacaggtattaaagtaattgaccttattgagccttatgcaaaaggtggtaagattggtttatttggaggtgccggagtaggtaaaacagtattaattcaggaattaattaacaacattgcaaaaggtcacggtggactttctgtatttgctggtgtaggtgagcgtactcgtgagggtaacgatttactacgtgagatgttagagtctggtattattaaatacggagatgactttatgcactctatggaagaaggtggttgggatttatctaaagttgataaatctgtaatgaaagattctaaagcaacctttgtatttggacaaatgaatgagccaccaggagcacgtgcacgtgttgcattatctggtttaactattgcagaatatttccgtgatggagcaggtgaaggtcaaggtaaagatgtacttttctttgtggataacattttccgttttacacaagctggttctgaggtatctgcattacttggtcgtatgccatctgcggtaggttaccaaccaacattagcaacagaaatgggtgctatgcaagagcgtattacatcaacaaaaagaggttctattacatctgtacaggcggtttacgtacctgcggatgatttaacggatccagcaccggcaactacctttgctcacttagatgcaacaacggtattgtctcgtaaaattgcagagttaggtatttacccagcggtagatccattagattctacttctagaatcttagctccagaaattttaggaaaagatcactactcttgtgcacaacgtgtaaaagagttgttacaacgttataaagaattacaagatattattgctatccttggtatggaagaattatctgaggaagataaaatggcagttggtagagcaagacgtgtacaacgtttcttatctcagcctttccacgtagcagagcaatttacaggtcttaaaggtgttttagtagatatcaaggatactattaaaggatttaatatgattatggatggtgaattagatcacttaccagaatctgcatttaaccttaaaggtactattgaagaagctatagaagcaggagaaaaaatgcttgctgaagcataa

SEQ ID NO: 673 - DNA, 819 bp, Ehrlichia risticii
  strain HRC-IL
cctaaaatatatgatgcattatatgtaaaactagataatgaaaatttgtgtttagaagtttcacaaattattggagataatgttgttagatgtattgcaatgggagctacttatggattaaatcgtggtttagaagtagtttgttcaggaaatccaattcaggttcctgtaggtgaacaagttttaggtagaatgtttaatgttgttggtaaaacaattgacaatcttgaatctttagatgataaaaatataaaaatgatgccaattcatcgaaatccaccatcatttgaagagcaatccaatgaaattgaaatttttgaaacaggcattaaagttattgatttattaattccatatgctaaaggtggtaagattggattatttggtggagcaggggttgggaaaacggttcttgttcaagaattaattcacaatatcgcaaaaggtcatggtggtctatctgtttttgctggagttggtgaaagaactcgtgaaggtaatgacttgtattatgaaatgattgaaggtggagttatagataaaacagccttagtgtttgggcaaatgaatgaacctcctggcgcaagaatgcgcgtagcattaactgctttaacaatggctgaatatttccgtgatgttcaaaaccaagatgttttgttatttattgataatatctttagatttacacaagctggtagtgaagtttcagcattattaggaagaatgccatctgctgttggttatcaaccaactttggcatatgaaatgggattgttacaagaaagaatcacttccactaaaagtggttctataacatct

SEQ ID NO: 674 - DNA, 840 bp, Vibrio cholerae
  ref <308>: DATABASE ACCESSION NUMBER: ATCC 25870
agagcgaagtaccaagtgtttacgatgctctgaatgttgtggattccaaagaacgtctggttctggaagttcaacagcagctaggcggtggcgtgattcgcgctatcgttatgggtagctcggatggtttacgtcgtggaatgacagtacaaaacactggcgctccaatttcagtaccagtaggtactaaaaccctaggtcgtatcatgaacgtgcttggtgatgcgattgacgaacgtggcgacattggcgcagaagaggtgtactcgattcaccgtcctgctccaagctacgaagaacagtctagtgcaactgaacttttggaaacgggtgttaaggttatcgacctgatctgtccgtttgcgaaaggcggtaaaatcggtctgttcggtggtgcgggtgtaggtaagaccgttaacatgatggaacttatcaacaacatcgcgctacagcactcaggtttgtcagtatttgctggggtaggtgagcgtactcgtgagggtaacgacttctaccacgaaatgcaggaagcgggcgttgtaaacgttgaacaaccagaactgtcgaaagtagcgatggtttacggtcagatgaacgagccaccaggcaaccgtctgcgtgtagcactgactggtctgactatggcggaaaagttccgtgatgaaggccgtgacgtactgctgtttatcgacaacatctaccgttacaccctagcgggaacggaagtatctgctctgcttggccgtatgccttcagcggtaggttaccaaccaacactggctgaagagatgggtgttctgcaagaacgtatcacgtcaaccaaaaaaggttctatcacct

SEQ ID NO: 675 - DNA, 828 bp, Vibrio cholerae
  ref <308>: DATABASE ACCESSION NUMBER: ATCC 25870
cggcggtatcctagttgtagcggcaactgacggtccaatgccacaaactcgtgagcacatcctgctgggtcgccaagtaggtattccttacatcatcgtattcatgaacaagtgtgacatggttgacgatgaagagcttctagagctggtagagatggaagttcgtgagctgctgtctgagtacgatttcccaggtgatgacctgccagtaatccaaggttcagcactaggcgcgctaaacggcgaagcacagtgggaagcgaagattgttgagctagcagaagcactggatacttayattccagagccagagcgtgcagtagacatggcattcctgatgccaatcgaagacgtattctcaatccaaggtcgtggtacagtagtaactggccgtatcgagcgcggcatcctgaaagtgggtgacgaagtagcgatcgttggtatcaaagagacagtaaaaacgacctgtacaggtgtagagatgttccgtaagctgcttgacgaaggtcgtgcaggtgagaacgtaggtgcactrctacgtggtactaagcgtgaagaagtagagcgtggtcaagtactggcgaagccaggttcaatcacaccacacactaagttcgaatcagaagtatacgtactgtcaaaagatgaaggtggccgtcatactccattcttcaaaggttaccgtccacagttctacttccgtacaactgacgtaacaggcagcattgagctaccagarggcgtagaaatggtaatgccaggcgacaacgtgaagatggttgtagacctgattgcaccaatcgcgatggacgaaggtctacgcttcgc

SEQ ID NO: 676 - DNA, 1298 bp, Leishmania enriettii
  ref <308>: DATABASE ACCESSION NUMBER: ATCC 50120
cttctcggatggcgtgccgccggtgctgacggcgctggacgtgacggaggaactcgggcgcgacgagccgctgacgctagagatcgtgcaacacttggacgcgcacaccggccgctgcattgcgatgcagacgacggacctactgaagctgaagtcgaaggtcgtgtcgaccggcgggaacatctctgtgcctgtgggccgcgagacgcttggccgcatcttcaacgtactgggcgacgcgattgaccagcgcggccccgtgggcgagaagatgcgcatggcgatccacgcggaggcgccgaagctggcggaccaggcggcggaggacacgatcctgacgaccggcatcaaagtgatcgatctgatcctgccgtactgcaagggcggcaagatcggtctgttcggcggtgccggtgtggggaagactgtgatcatcatggagctgatcaacaacgtcgcgaagggccacggtggcttctccgtgttcgccggcgttggggagcgcacccgcgaggggacggatctgtacctggagatgatgcaatcgaaggtgatcgacctgaaaggtgagtcgaagtgtgtgcttgtgtacgggcagatgaacgagcccccgggtgcgcgcgcgcgcgttgcgcagtctgcgctgacgatggccgagtacttccgcgacgtggagggccagaacgtgctgctgttcatcgacaacatcttccgcttcacgcaggcgaactccgaggtgtcagcgctgctgggccgcatccccgccgctgtgggctaccaaccgacgcttgcggaggatctcggcatgttgcaggagcgcatcacgtcgacgacgaaggggtcgatcacgtctgtgcaggcggtgtacgtgcctgcggatgatatcacggatcccgcgccggcgacgacattctcgcacctggacgcgacgacggtgctggaccgcgcggtggcggagtctggcatctaccccgcggtcaacccactggagtgcgcgtcgcgtatcatggaccctgatgtgatcgacgtggatcactacaacgttgcgcaggacattgttcagatgctgaccaagtacaaggagctgcaggatatcattgcggtgcttggtatcgacgagctgagcgaggaggacaaggttgtggtggaccgtgcgcgcaaggtgacccggttcctgtcacagccgttccaggttgcggaggtgtttactggcatgacaggccattacgtacagctgagcgacacggtggagtcgttctccggtttgctgatggggtcgtacgaccagattccggaga

SEQ ID NO: 677 - DNA, 1083 bp, Babesia microtti
  strain Persing-1
caagctcaagtctgagcgtgagagaggtattactattgacattactctctggaaatttgagacccagaaatacgagtacactgtcatagacgcacctggtcatcgtgactttatcaaaaatatgattactgggacttcacaagccgacgttgctatgcttgtcgttcctgctgaatctggcggattcgaggctgctttttccaaagaaggtcagacccgtgaacacgccttactagccttcacacttggcgtcaaacagatgattgttgctattaacaaaatggattcttgtcagtacaaggaggatcgttatatggaaattttcaaggaagtacagcagtacttgaagaaggtgggttacaaagttgaaagcgtgccgtttgttgctatttcaggattccacggtgacaacatggttgaaaaatctactaacatgccttggtataagggtaagaccctcgtagaggcacttgatcaaatggagcctccaaaacgtccggtcgaaaaacctcttagattgcccctgcagtcagtctataaaattggaggtattggtacggtaccagtcggaagggtcgaaacaggacaactgaaagcaggaatgatcattacttttgcccccactggtttgaccactgaatgtaaatctgttgaaatgcatcacgaggttgtggaagtggctagccccggtgataacgttggatttaatgtcaagaatgtgtctgttaaggatattaagagaggaaatgtggcttcggattcgaaaaatgacccagccaaggaagctacctctttctctgcacaagtcattgtactcaatcaccctggtaccatcaaggccggttactcacctgtggttgattgccatactgcccacattgcttgcaaattcgaatctctagacactaggattgacaagcgtactggcaagactttggaagaaaatcctaagactattaagaatggtgacgctgccatggtgactatgaaaccaaataaacccatggttgtggaaactttcaccgactacgccccgttgggccggttcgccgtgcgtgatatgcgccaaaccgttgccgtcgg

SEQ ID NO: 678 - DNA, 551 bp, Cryptococcus neoformans
  strain Lev-12
tgtgctcattcaggagctcattaacaacattgccaaggctcacggtggttactctgtcttcactggtgtcggtgagcgaactcgtgagggtaacgacttgtaccacgaaatgagggagactggtgttatcaaccttgagggtgactccaaggtcgctcttggtgagttcttttttttcttcaggctaattagtcgatgacgtgggccctgactaaaactgtttcttccagtcttcggtcagatgaacgagccccctggagcccgtgcccgagttgcccttactggtttgaccattgccgagtacttccgtgacgaggaaggccaggatgtgttgcttttcattgacaacattttccgattcacccaggccggttccgaggtgtctgccttgctcggtcgtatcccctctgccgtcggttaccagcccactctttccaccgacatgggtggtatgcaggagcgaatgtaggttgcattctctgtgattttacggcaagccttgactttttttttctagtaccaccaccaagaagggttccattacctccgtc

SEQ ID NO: 679 - DNA, 552 bp, Cryptococcus neoformans
  ref <308>: DATABASE ACCESSION NUMBER: ATCC 44104
tgtgctcattcaggagctcattaacaacattgccaaggcccacggtggttactccgtcttcaccggtgtcggtgagcgaactcgtgagggtaacgacttgtaccacgaaatgagggagactggtgttatcaaccttgagggtgactccaaggtcgctcttggtgagttcttttttttgggagctaattagtcgatgacgtgggccctgaccaaaaccgtttctttcagtcttcggtcagatgaacgagccccctggagcccgtgcccgagttgctcttactggtttgaccattgccgagtacttccgtgacgaggaaggccaggatgtgttgcttttcattgacaacattttccgattcacccaggccggttccgaggtgtctgccttgctcggtcgtatcccctctgccgtcggttaccagcccactctttccaccgatatgggtggtatgcaagagcgaatgtaagttgcattttttgtgattttacggcaagtcttgacttacatttttttctagcaccaccaccaagaagggttccattacctccgtc

SEQ ID NO: 680 - DNA, 1018 bp, Cunninghamella bertholletiae
  ref <308>: DATABASE ACCESSION NUMBER: ATCC 42115
tctccctgctattttaaacgctcttgaagttaaggatcatgctggtggtcgtcttgttcttgaagttgctcaacacttgggtgaaaacactgtacgtactattgctatggatggtactgaaggtaagtttatttttagatgatcataaataattgatcataatgataaaaaaaaaagaagaagaagaacaggatgtatataatggttaataaataatattttcatattgkatataactatttaatctgtttttttttcttcatgattatatatatatatgtmctaatatctaatatgaaccttttttataaaattaatcaggtcttgtccgtggtcaaaaggttgttgatactggtgctcctattaccattcctgttggtaaggaagttcttggtcgtatcatcaacgttattggtgaacccattgatgaacgtggtcctattaaggccaagtctcaccgtgctattcacgctgaagctccagaattcgttgatcaatctcctactcccgaaattcttgaaactggtattaaggttgtcgatttattagctccttatgctcgtggtggtaagattggtcttttcggtggtgctggtgtaggtaaaactgtcttgattcaagaacttattaacaacattgctaaagcccatggtggttactctattttctgtggtgttggtgaacgtactcgtgaaggtaacgatttataccacgaaatgatggaaactggtgtcattaaacttgaaggtgactccaagtgtgctcttgtattcggtcaaatgaacgaacctcctggtgctcgtgcccgtgttgctttaactggtttaaccattgctgaatacttccgtgatgaagaaggtcaagatgtgttacttttcattgataacattttccgtttcactcaagctggttctgaagtatctgcccttttaggtcgtattccatctgctgtaggttaccaacccactttatctactgatatgggtggtatgcaagaacgtattactactaccaagaa

SEQ ID NO: 681 - DNA, 23 bp, Artificial Sequence
  Synthetic DNA Sequence
  modified_base (3): i
  modified_base (6): i
  modified_base (12)..(13): i
  modified_base (15): i
  modified_base (18): i
ggnssnttyggnnsnggnaarac

SEQ ID NO: 682 - DNA, 26 bp, Artificial Sequence
  Synthetic DNA Sequence
  modified_base (3): i
  modified_base (6): i
  modified_base (21): i
  modified_base (24): i
gtnacnggytcytcraarttnccncc

SEQ ID NO: 683 - DNA, 26 bp, Artificial Sequence
  Synthetic DNA Sequence
  modified_base (3): i
  modified_base (6): i
  modified_base (9): i
  modified_base (12): i
  modified_base (15): i
  modified_base (21): i
  modified_base (24): i
gtnacnggntcnswnawrtcnccncc

SEQ ID NO: 684 - DNA, 3267 bp, Candida tropicalis
atggctggtgctttagaaaacgcaagaaaagaaattaaacgtctttcattagatgacaccaatgaatcccaatatggtcaaatctattctgtttccggtccggttgttattgccgaaaacatgattggatgtgccatgtacgaattggttaaagttggtcatgataatttagttggggaagttattagaattaatggtgataaagcaaccattcaagtttatgaagaaactgcaggggtcactgttggtgatccagttttaagaactggtaaaccattatctgttgaattaggtcctggtttaatggaaactatttatgatggtattcaaagacctttaaaagccattaaagatgaatcccaatctatttatatcccaagaggtattgatgttcctgctttatcaagaactgttcaatatgatttcactccaggtcaattgaaagttggtgatcatatcactggtggggacatttttggttctatttatgaaaactctttattggatgaccataagattttgttacctccaagagcaagaggtactattacttctattgctgaagccggttcttataatgttgaagaaccagttttggaagttgaatttgatggtaagaaacataaatactctatgatgcatacatggccagttagagttccaagaccagttgctgaaaaattgactgctgatcatccattgttgaccggtcaaagagtcttggattctttattcccatgtgttcaaggtggtactacttgtatcccaggggcttttggttgtggtaaaactgttatttctcaatctttgtccaaattctccaactctgatgttattatctatgttggttgtttcactaaaggtactcaagtcatgatggctgatggtgccgacaaatctattgaatctattgaagttggtgacaaagtcatgggtaaagatggtatgccaagagaagttgttggcttaccaagaggttatgatgatatgtacaaggttcgtcaactttctagtactagacgtaatgctaaatccgaaggcttgatggatttcactgtttctgctgatcataaacttatcttgaaaactaaacaagatgtcaagattgctacacgtaaaattggtggcaacacctatactggtgttactttctatgttttggaaaagactaagactggtattgaattagttaaagccaagactaaagttttcggtcatcatatccatggtcaaaatggcgctgaagaaaaagctgctacttttgctgctggcattgactctaaagaatacattgattggatcattgaagctagagattatgtacaagttgatgaaattgtcaagaccagcaccactcaaatgatcaacccagttcattttgaatctggtaaactcggtaactggttacacgaacacaagcaaaacaaatcacttgctccacaattgggttacttgttgggtacttgggctggtattggaaatgttaaatcttctgctttcaccatgaactccaaagatgatgttaaattagctacaagaattatgaactactcttcaaaattgggcatgacttgttcttctactgaatccggtgaactcaatgtcgctgaaaacgaagaagaatttttcaataaccttggtgctgaaaaggatgaagctggtgatttcacttttgatgaatttaccgatgctatggatgaattgactatcaatgttcatggtgcagctgcaagcaagaagaacaatttgttgtggaatgctttgaaatctcttggtttcagagccaagtctactgatattgtcaagagtattcctcaacatattgctgttgatgatattgttgtcagagaatctttgattgccggtttagttgatgctgctggtaatgttgaaaccaaatccaatggttctattgaagctgttgttagaacttctttcagacatgtcgctagaggtcttgtcaagattgctcattctttgggtattgaatcatctattaatattaaagatactcacattgatgctgctggtgttagacaagaatttgcttgtattgtcaatttgactggtgctccacttgctggtgttctttctaaatgtgcacttgcaagaaaccaaactccagttgtcaaatttaccagagacccagttttgttcaactttgatttgatcaaatctgcaaaagaaaactattatggtattactttggctgaagaaactgatcatcaattccttttatccaacatggccttggtgcacaactgtggtgaacgtggtaatgagatggctgaagttttgatggaattcccagaattgtttactgaaatttctggtagaaaagaaccaattatgaaacgtaccactttggttgccaatacttctaatatgccagtcgctgccagagaagcttctatttatactggtattacattggctgaatatttcagagatcaaggtaagaatgtttctatgattgctgattcttcttcacgttgggctgaagctttgagagaaatttctggtagattgggtgaaatgcctgctgatcaaggtttcccagcttatttgggtgctaaattggcttctttctatgagcgtgccggtaaagccactgctttgggttcaccagatagagttggttcagtttctattgttgctgctgtttctccagctggtggtgatttctctgatccagttactacttctactttgggtattactcaagttttctgggggttggataagaaattggcccaaagaaaacatttcccatctattaacaccagtgtttcttattctaaatacaccaatgttttgaacaaatactatgattccaactatccagaattcccacaattgagagacaaaattagagaaattttatctaatgctgaagaattggaacaagttgttcaattagttggtaaatctgcattgtctgattctgataagattactttagatgttgctaccttgattaaagaagatttcttgcaacaaaatggttattcttcatatgatgcattctgtccaatttggaagacttttgatatgatgagagcatttatttcatattatgatgaagcacaaaaagcaattgccaatggtgctcaatggtctaaattagctgaaagtactagtgatgttaaacatgctgtttcttcagctaaattctttgaaccatcaagaggtcaaaaagaaggtgaaaaagaatttggagatttattaaccactatctccgaaagatttgctgaagcttcagaataa

SEQ ID NO: 685 - DNA, 1782 bp, Enterococcus hirae
  ref <308>: DATABASE ACCESSION NUMBER: ATCC 9790
ttgcaaattggaaaaatcataaaagtctccggtcctctcgttatggcagaaaatatgtcagaagcaagtattcaagacatgtgtttagtgggagatttaggagtcatcggcgaaatcattgagatgcgtcaagatgtggcgtctattcaagtatatgaagaaacttcaggaattggtcccggagaacctgttcgttccactggggaagcactatctgttgagctaggaccaggaatcatttcacaaatgtttgacgggattcaaagaccactggatacatttatggaagtgactcaaagtaacttcttaggacgtggggtccaattaccagctttagatcatgagaaacaatggtggtttgaagcgacaatcgaagaaggaacagaagtaagtgctggagacatcattgggtacgtggatgaaacgaagatcattcagcacaaaatcatggtccctaatggtatcaaaggaactgtacaaaaaattgaatctggatcatttacgatcgatgatccgatttgtgtgatcgaaacggaacaaggcttaaaagagctgacgatgatgcaaaaatggccagtacgtcgtggtcgaccaatcaaacaaaaattaaatccagatgtaccgatgatcaccggtcaaagggtcattgacacgtttttcccagtaactaaaggaggagcggcagccgttccaggtccgtttggtgcagggaagacagttgtgcaacaccagattgctaagtggtcggacgtagatctagtggtttacgttggttgtggggaacgaggaaatgaaatgacggatgtcgtcaatgaatttcctgaactgatcgatccaaatacaggcgagtctttgatggaacgaactgtgttgatcgctaatacatcgaacatgccagtagctgctcgagaagcttctatttatacgggaatcacgattgccgagtacttccgtgacatggggtatgatgtagcaatcatggcagattccacttctcgttgggcagaagcactgcgtgaaatgagcggacgtttagaagaaatgcctggtgatgaaggttatcccgcttatctgggctctcgtctagctgaatactatgaacgttcaggacgtgtcattgctctaggctctgaccaacgtgagggcagtatcactgccatcagtgcggtttctccttctggtggagatatctctgaaccagtgactcaaaataccttacgtgtggtgaaggttttctggggattagattctagtcttgctcaaaaaagacattttccatcgattaactggatccaaagttactcattatattcaacagaagttggcagatatatggatcaaatcttacaacaggattggtctgatatggtaactgaaggcatgcggatcttgcaagaagaagaacaattaaatgaaatcgtgcgcttggtagggatcgattcgctttctgataacgatcgcttgacccttgaagtagcaaaatcgattcgagaagactatttacaacaaaatgcttttgatgatgtagatacgtttacttcaagagaaaaacaattcaacatgttgaaagttattttgacttttgggaaagaagctcgaaaagccttatcgttgggagcgtacttcaatgaaatcatggaaggtacagtagcggtcagagaacgcattagtcggagcaagtatattccagaagaagagttagccaaaattagtagtataaatgaagaaatcaaagaaacgatccaattgattgtttcagaaggagggatgaccgatgattaa

SEQ ID NO: 686 - DNA, 1781 bp, Chlamydia pneumoniae
  strain CWL 029
cagggacatgttatagaagcttatggaaacttgttacgtgtacgctttgacggatatgttagacaaggtgaagttgcatatgtcaacgtagataatacctggttaaaagcagaagtgattgaagttgctgatcaagaagtcaaggttcaggtatttgaagatacacaaggcgcgtgtcgaggagctcttgttacgttttcaggacatcttttagaagccgagttagggcctggcttgcttcagggcattttcgatggacttcaaaatcgtcttgaggtgctagctgaagatagttctttcttgcagagaggcaagcatgttaatgctatttctgatcataatttatggaattatactcccgtagcttctgttggggatactttaagacgaggagatcttctaggaacagtacctgaaggacgatttactcataagattatggttcctttttcttgctttcaagaggttaccctgacttgggtaatttctgaaggaacctataatgctcatactgtggtcgcaaaagctcgagatgctcagggtaaagaatgtgcctttactatggtgcaaagatggccgatcaaacaagcttttattgaaggagagaagatccctgcgcataagattatggatgtgggtttgcgaatcttagatacgcaaattccagtattgaaggggggaactttctgtaccccaggaccttttggtgcagggaaaacagtcttacaacaccatctttctaagtacgctgctgtagatattgtgattttgtgtgcgtgcggagagcgtgctggtgaagttgttgaggtattacaagagttccctcatcttatcgacccccataccggaaagtctttaatgcacagaacatgtattatttgtaacacatcatccatgcctgtggctgcccgagagtcttcgatctatttaggagtgacgattgcagaatactatcgccagatgggactagatattctgcttttagctgattctacatcccgatgggcacaagcccttagagagatttcgggacgtcttgaagaaatccctggagaggaagcatttcctgcatacctgtcttctagaatagctgctttttatgagcgaggaggagctatcaccacgaaagatggttctgaaggatctttaactatatgtggtgcggtgtctcctgcaggaggaaactttgaagaaccagtcactcaatctacattagctgtagtcggagcgttctgtggtctttcaaaagcacgagctgacgcacgtaggtatccttcaatagaccctttgatttcttggtcaaaatatttgaaccaggtaggacaaattttagaagagaaggtttcaggctggggtggtgctgtgaaaaaagcagcacagtttctagagaaaggttcagaaatcggcaagcgtatggaagttgtcagtgaagaaggggtttctatggaagacatggaaatctacttaaaggcagaactttatgatttttgtkatctccagcagaacgcattcgatcctgtggactgttattgtccttttgagagacagatagagttattttcattaatcagtcgtatttttgatgctaaatttgtttttgatagtcctgatgatgcaagaagctttttccttgagctgcagagcaagattaagacattaaatggcctgaaatttctttcagaggaatatcatgagagtaaagaggtcatagttagactgttggaaaaaacaatggtacaaatggcgtaaggatatgcaaacaatctacacaaaaataactg

SEQ ID NO: 687 - DNA, 1758 bp, Halobacterium salinarum
atgagtcaagctgaagcaatcactgacaccggcgaaatcgagagcgtgagcggtccggtcgtgaccgccacgggcctcgacgcgcagatgaacgacgtcgtctacgtgggcgacgagggtctgatgggcgaggtcatcgagatcgaaggcgacgtaaccaccatccaggtctacgaggagacgtccggcatcgggccgggccagcccgtcgacaacacgggcgaaccgctcaccgtggacctgggcccggggatgctggactccatctacgatggtgtgcagcgtccactggacgtcctcgaagacgagatgggggcgttcctcgatcgcggtgttgacgcacccggcatcgacctcgacaccgactgggagttcgagcccaccgtcgaggcgggcgacgaggtcgcggccggcgatgtcgtcggcaccgtcgacgaaacggtcagcatcgaacacaaggttctggtgcccccccgcagtgacggcggcgaagtcgtcgccgtcgaatccggcacgttcaccgtcgacgacacggtcgtcgagttggacaccggcgaggagatccagatgcaccaggagtggccggtccgccgccagcgccccaccgtcgacaagcagacgccgacggagccgctggtgtccggccagcgcatcctcgacggcctgttcccgatcgcgaaaggcgggacggccgcgatcccggggccgttcgggtccgggaagacggtcacccagcagtccctcgcgaagttcgccgacgcggacatcgttgtctacatcggctgtggtgagcgcggcaacgagatgacggaagtcatcgaggacttcccggagctgcccgacccccagaccgggaacccgctgatggcccgcaccacgctcatcgcgaacacgtcgaacatgccggttgccgggcgtgagtcctgcatttacacgggaatcaccatcgcggagtactaccgcgacatgggctacgacgtggcgctgatggccgactccacctcgcggtgggcggaggccatgcgggagatctcctcgcgactcgaggagatgcccggcgaggaggggtatcccgcgtacctggccgcccgcctctcggagttctacgagcgcgccggctacttcgagaacttcaacgggaccgagggctccatctcggtcatcggtgcggtgtcgccgcccggcggggacttctccgagccggtcacccagaacacgctgcgcatcgtgaagacgttctgggcgcttgactcggacctcgccgagcgccggcacttcccggcgatcaactgggacgagtcctacagcctctacaaggaccaactcgacccgtggttcacggacaacgtcgtcgacgactgggccgagcagcgccagtcggcggtcgacatcctcgacgaggaatccgaactcgaagagatcgtgcagctcgtcgggaaggacgcgctgcccgaggaccagcagctcacgctggaagtcgcgcggtacatccgcgaggcgtggctccagcagaacgcgctccacgacgtggatcgctactgcccgcccgagaagacgtacgccatcctctccggcatcaagacgcttcacgaggagtcctttgaggcgttggacgccggtgtgccagtcgaggagatcacgtcgatcgacgccgcgccgcgcctgaatcgtctcggcacgacgcccgacgacgagcacgaggcggaggtcgcggagatcaaacagcagattaccgagcagcttcgggagctctactga

SEQ ID NO: 688 - DNA, 3118 bp, Homo sapiens
gaattccggcagctgactagtcttgtgattggggtcctgggctgataaaatcattccaaatgacgagcacattgataaagacgtccgatgaggaccgggagtccaaattcggctttgtttttgccgtatctggacctgtggtgacagctgaacgaatggccggttctgctatgtacgaactggtgcgtgtcggttattatgaactggtcggagagatcatccggttggagggtgacatggcaacaatccaagtatacgaagacacctcaggtgtgacagtaggcgatcccgtgctgcgcacaggcaagccgctgtccgtggaactgggacccggaatcatgggcagcatcttcgacggtatccagcgaccgctgaaggatatcaatgaactgtcaaatagtatctacatcccgaaaggtgtcaatgtgcctgccctgagtcgcactgcacagtgggacttcagtcccgtcagtgtcaaggttggaagccacattactggtggtgacctgtacggtttggtccacgaaaatactctggtgaaacacaagttgctgctgccgccccgtgccaagggaactgtcacgtacattgcagaacctggaaactacacagttgatgatgttgtcctggagacagaatttgacggcgagcgatcaaagttcaccatgctgcaagtgtggcctgtacgtcagcccaggcctgttacagaaaagttgccagctaactaccccctccttactggccagcgtgtgctcgactccctattcccgtgtgtccagggtggaacaacagctattcctggggccttcggatgtggcaagactgtaatatcacagtctttgtcaaaatactcaaactccgatgtaattatctatgtaggttgtggtgagcgaggtaatgaaatgtcagaagtactcagggatttcccgcagttgtcgttggagattgatggtgtgactgaatcaatcatgaagagaacagccctggtcgcaaacacatcaaacatgcctgtggctgctcgagaagcatctatctacacaggtattacactgtcagaatacttcagggacatgggttacaatgtatccatgatggctgactcaacttcacgatgggccgaagctcttcgagaaatctcaggtcgattggctgaaatgcctgccgacagcggttatcccgcctacctaggtgcacgacttgccagtttctacgagcgtgccggccgtgtgaagtgcttgggtaacccagacagggagggctccgtgagtatagtgggcgccgtgtcgccgcccggtggagacttctcagatcccgtgacgacggccacactaggtatcgtccaggtgttctggggtctcgacaagaaacttgcccagcgaaagcacttcccatccatcaactggctcatctcgtacagtaaatacatgcgtgctctggatgacttctacgacaagaatttcccagagtttgtcccactgcgtacaaaggtgaaggagattttgcaggaggaagaagacctgtctgaaattgtgcagttggtcggtaaagcttcattggcagaaactgacaagatcacacttgaggttgccaaactattaaaggatgatttcctgcaacagaacagctattcaccatatgaccgtttctgcccattctacaagacagtaggaatgctgaaaaatatgattgctttctacgatatgtctcggcatgcagttgaatctactgctcagagcgagaacaagatcacttggaatgttattagagattctatgggcaatattctgtatcagctttcctccatgaaattcaaggatccagtcaaggatggagaagcgaagatcaaggcagactttgagcagcttcatgaagacattcagcaagccttcaggaacctggaggattaaagtggtagctgccagtggttctctcggtgcagttgtcacatttggcaagctctgtagggttgccgagtggcatcggtgctagacacctgagcattcctttgccacataaagactaaagcaggtggaatttcagttgtaaaaagctggttccattggtgctaagattatgttgtgcccttttctgcttctcacattccaacagaggaatttacttccagttttcttccattttcctcctcattttaagtgtcggtacagaggcaataatctgataactctgtaccgtcacttacaagcagggagaatttgtaattattacaaatcccattatctctgtgcaccacagccttgtaaattcatttgtcccaggactccctcttgtgtgtacgtgagattgccgtctgtatgtatgtacacaccgtactgcagtatttgaagtcagtcagaaggtgaattacaccacttactcattgtgtcacgtagcaagtgtgcaaactgccatccattgtcctatttattcacataactagttttctttgcatttccagtgttgcaaattgtgtttagaaaattatgccatcgagactggtcgaacctcacattgtaactcagtatttacacacacgtttacttgctacagaaatgtagaaaaaataattgttgtatattgaaagtacaagtgacaaagttgcatttaaaatggtgaatgtattttatatttcttttgtagacacaagagttaatgcattttgcttaatggagatgtatgtaaacctaaaatagcagtttgtgcacaaattatgtatatgtgaaatggagatggtttctaatttgctgattgattgccagtattaatttaaacaactgtagttgtgggatgtagtgggaagattttttttttcctataaaattggtggatgtatgtgtcggagattttgattgtatgtgtaaaatagtgatcccagtaactgtaaagctttagaatacagttactgactgtatagttgtacaggtgttgttacttttaagaatttattgacacaaaggtgaaagtctattattgtattgtaatgtttaaagcatttaaggtttaaaaatcctacttctgtgtataaatgttaccattcctcatataacataactgtgtagaaatacagtcaacttcatgttcattagcatttcactgttgtcacataaattatgcccggaat

SEQ ID NO: 689 - DNA, 1836 bp, Plasmodium falciparum
  strain 3D7
atgacaaaagttgctgttgaaaaagaggaaccaggagttgtttataaggtggctggttcattagttattgctgagaatatgagtggaactcgtatgtacgagttagctaaagtaggatggaataaattggttggagaaattattagattagaagggaattatgcatatatacaagtttatgaagatacttcaggtttatctgtaggagaccctgttataaaaacaggaaatgctttatcagtcgaattgggtcctggtattttagataatatttatgatggtattcaaagaccattagaaagaatagcaaatgtgtgtggtgatgtatatatatataaaggtattgatatgacatctttagatcatgataaacaatggcaattttatgctgataagaaattaaaattaaatgatattgttactggtggagatatctttggatttgttgatgaaaataaattatttaaagaacacaaaattatggctccacctaatgctaaagggaggcttacatatattgctccagatggatcatatactttaaaagataaaatatttgaattagaatatcaaggaaaaaaatatacatatggtttatctcatttatggcctgttcgtgatcctagacctgttttagaaaaggtaacaggggatactttattattaacagggcaaagagttttagattcgttatttccaacagttcaaggaggtacttgtgctattcctggtgcatttggttgtggaaaaacttgtgtttctcaggccttatcaaaatattctaatagtgaagttattatatatgtaggatgtggtgaaagaggtaatgaaatggctgaaattttatccgactttcctgaattaactactaaagtagataatgaagatgtaggtattatgcaaagaacgtgtttagttgctaatacttctaacatgcctgtcgctgcaagagaagctagtatttatacaggtattactttatgtgaatatttccgtgatatgggttataatgctaccatgatggctgatagtacaagtagatgggcagaagccttaagagaaatttcaggacgtttagctgaaatgcctgcagatagtggttatccagcttatttaggtgctagattagcttccttttatgaacgtgcaggaaaagtcaaatgtattggttctccatctcgtataggatccattacaattgtgggtgctgtgtctccaccaggtggtgatttctctgaccctgtaactacagcaaccatgtctattgttcaagcattttgggggttagataaaaaactagctcaaagaaaacatttcccttctgttaattggtctacatccttttcaaagtatgtcagacaattagaacaatactttgataattttgatcaagatttcttatctttaagacaaaaaattagtgatattttacaacaagaaagtgacttgaatgatattgttcaactagtaggaaaggattcattatcagaagaccaaaaagttgttatggaagtagccaaaattattagagaagattttcttcaacaaaatgcatttagcgattatgattatatgtgcccattacaaaaaacagttggtatgatgagaattatttgccacttttatgctcaatgcttaagaacattacaagaatatgactcaagagaaagaaaaattggttggggatctatatataatacattaagaccaactataaataaaattacacatatgaaatttgaaaacccaaaaaattcagatgaatatttcaaaaagtattttaaggcacttgaagaagaaataacagtaggtttaagaaacttgatggaaaaatga

SEQ ID NO: 690 - DNA, 3216 bp, Saccharomyces cerevisiae
  strain X2180-1A
atggctggtgcaattgaaaacgctcgtaaggaaataaaaagaatctcattagaagaccatgctgaatctgaatatggtgccatctattctgtctctggtccggtcgtcattgctgaaaatatgattggttgtgccatgtacgaattggtcaaggtcggtcacgataacctggtgggtgaagtcattagaattgacggtgacaaggccaccatccaagtttacgaagaaactgcaggccttacggtcggtgaccctgttttgagaacaggtaagcctctgtcggtagaattgggtcctggtctgatggaaaccatttacgatggtattcaaagacctttgaaagccattaaggaagaatcgcaatcgatttatatcccaagaggtattgacactccagctttggataggactatcaagtggcaatttactccgggaaagtttcaagtcggcgatcatatttccggtggtgatatttacggttccgtttttgagaattcgctaatttcaagccataagattcttttgccaccaagatcaagaggtacaatcacttggattgctccagctggtgagtacactttggatgagaagattttggaagttgaatttgatggcaagaagtctgatttcactctttaccatacttggcctgttcgtgttccaagaccagttactgaaaagttatctgctgactatcctttgttaacaggtcaaagagttttggatgctttgtttccttgtgttcaaggtggtacgacatgtattccaggtgcttttggttgtggtaagaccgttatctctcaatctttgtccaagtactccaattctgacgccattatctatgtcgggtgctttgccaagggtaccaatgttttaatggcggatgggtctattgaatgtattgaaaacattgaggttggtaataaggtcatgggtaaagatggcagacctcgtgaggtaattaaattgcccagaggaagagaaactatgtacagcgtcgtgcagaaaagtcagcacagagcccacaaaagtgactcaagtcgtgaagtgccagaattactcaagtttacgtgtaatgcgacccatgagttggttgttagaacacctcgtagtgtccgccgtttgtctcgtaccattaagggtgtcgaatattttgaagttattacttttgagatgggccaaaagaaagcccccgacggtagaattgttgagcttgtcaaggaagtttcaaagagctacccaatatctgaggggcctgagagagccaacgaattagtagaatcctatagaaaggcttcaaataaagcttattttgagtggactattgaggccagagatctttctctgttgggttcccatgttcgtaaagctacctaccagacttacgctccaattctttatgagaatgaccactttttcgactacatgcaaaaaagtaagtttcatctcaccattgaaggtccaaaagtacttgcttatttacttggtttatggattggtgatggattgtctgacagggcaactttttcggttgattccagagatacttctttgatggaacgtgttactgaatatgctgaaaagttgaatttgtgcgccgagtataaggacagaaaagaaccacaagttgccaaaactgttaatttgtactctaaagttgtcagaggtaatggtattcgcaataatcttaatactgagaatccattatgggacgctattgttggcttaggattcttgaaggacggtgtcaaaaatattccttctttcttgtctacggacaatatcggtactcgtgaaacatttcttgctggtctaattgattctgatggctatgttactgatgagcatggtattaaagcaacaataaagacaattcatacttctgtcagagatggtttggtttcccttgctcgttctttaggcttagtagtctcggttaacgcagaacctgctaaggttgacatgaatggcaccaaacataaaattagttatgctatttatatgtctggtggagatgttttgcttaacgttctttcgaagtgtgccggctctaaaaaattcaggcctgctcccgccgctgcttttgcacgtgagtgccgcggattttatttcgagttacaagaattgaaggaagacgattattatgggattactttatctgatgattctgatcatcagtttttgcttgccaaccaggttgtcgtccataattgcggagaaagaggtaatgaaatggcagaagtcttgatggaattcccagagttatatactgaaatgagcggtactaaagaaccaattatgaagcgtactactttggtcgctaatacatctaacatgccggttgcagccagagaagcttctatttacactggtatcactcttgcagaatacttcagagatcaaggtaaaaatgtttctatgattgcagactcttcttcaagatgggctgaagctttgagagaaatttctggtcgtttgggtgagatgcctgctgatcaaggtttcccagcttatttgggtgctaagttggcctccttttacgaaagagccggtaaagctgttgctttaggttccccagatcgtactggttccgtttccatcgttgctgccgtttcgccagccggtggtgatttctcagatcctgttactactgctacattgggtatcactcaagtcttttggggtttagacaagaaattggctcaaagaaagcatttcccatctatcaacacatctgtttcttactccaaatacactaatgtcttgaacaagttttatgattccaattaccctgaatttcctgttttaagagatcgtatgaaggaaattctatcaaacgctgaagaattagaacaagttgttcaattagttggtaaatcggccttgtctgatagtgataagattactttggatgttgccactttaatcaaggaagatttcttgcaacaaaatggttactccacttatgatgctttctgtccaatttggaagacatttgatatgatgagagccttcatctcgtatcatgacgaagctcaaaaagctgttgctaatggtgccaactggtcaaaactagctgactctactggtgacgttaagcatgccgtttcttcatctaaattttttgaaccaagcaggggtgaaaaggaagtccatggcgaattcgaaaaattgttgagcactatgcaagaaagatttgctgaatctaccgattaa

SEQ ID NO: 691 - DNA, 1860 bp, Schizosaccharomyces pombe
  strain 972 h-
atggcgggaggaattgaactggccaagaaggctatcaggagcctcaaaaattacgacgagcatgaaaaccgatatggatctattttcagcgtttctggtcctgtcgttgttgcagccaatatgcttggatgttcgatgtacgaactcgttcgcgttggtcatgaagaactagttggtgaagtaattcgtatccatcaagataaatgtactattcaagtatacgaagagacgtccggtctcactgttggtgatcctgtccaacgcactggaaagccattatctgttgaattaggtcctggtttagctgagactatttatgatggtatccaacgtccgttaaagcaaattttcgacaaatctcaaagtatttatattcctagaggtattaatacagaatcacttaatcgtgagcataagtgggatttcacaccaaataaggatttacgcattggcgatcatgtatccggtggtgatgttttcggttctgtatttgaaaactctcttttcaatgatcataaaattatgttaccccctagagcccgtggtaccgtcacatatattgctgaagctggatcataccatgttgatgaaaaacttcttgaagtcgagtttaatggcaagaaacattcttttagtatgttgcatacttggcctgtccgtgctgctcgtccagttgcggacaacttaactgctaatcaacctttattgactggtcaacgtgttttggatgcgttatacccctgtgttcaaggtggcactactgctatccccggtgcctttggttgtggtaaaacagttatttcacaatctctttctaagtactctaattctgatttgattgtttacgtcggttgtggtgaacgtggaaacgaaatggcagaagtgttaatggatttcccagaactaacaattgatattaatggtaaaccagagcccattatgaagcgtactacattggtagccaacacttctaacatgcctgtcgctgctcgtgaagcttccatttataccggtattacacttgctgaatattatcgtgatcaaggtaagaacgtttcaatgatggctgattctacatctcgttgggctgaagctttgcgtgaaatttctggtcgtttggctgagatgcctgccgattctggttatcccgcttatttgggtgccaaattggcttctttttacgaacgtgctggtcgtgctcgttgcttgggaagtcctgaccgtgaaggaacagtttcaattgttggagctgtttctcctccgggtggtgatttttctgatcctgttactagtgcaaccttgggaattgttcaagtcttctggggtttggacaagaaattggcccaacgtaaacactttccctcaatcaacacctctctttcctattctaaatacatcaatgctttgcaaccttggtatgaggaaagagttccaggctttaatactcttcgtgatcaaatcaaacagatcattcaacaagaagattccatgttggaaattattcagttggttggtaagtcggctctttctgaaacggataaagttactttggacatagccggtattattaagaatgacttcttacaacaaaacggttattctgattacgatcgctgttgccctctttacaagacttatcatatgatgcgaaacatgattgcttactacacaaaggctaaaagtgccgttgaaactggtagcgttccttggtcaaagattaaagaaagtacttcagatatcttttatgagttaacctcgatgaaattcgaaaaccctaatgaaggcgagaaggaaatagtcgaacactatgaaactctgcacaagaagattgaggacaagtttcacactctgactgagtaa

SEQ ID NO: 692 - DNA, 1833 bp, Trypanosoma congolense
  strain IL3000
atgacgagcgataaaaacccttacaaaacagagcagcgcatgggggccgtgaaggccgtctccgggccagttgtcattgctgaaaacatgggcggtagcgctatgtatgagcttgtgcaggtaggttccttccggttagtgggcgagatcattcgtctagagggcgataccgccactattcaggtctatgaggaaacaggtggcctcactgtcggagacccggtgtactgtacgggtaagcctctttcgcttgagcttggacctggaatcatgtctgaaatatttgacggtatccagcggcctcttgacaccatctaccgcatggtggaaaacgtgtttatccccaggggcgttcaggtgaagtcactcaatgaccagaaacagtgggactttaagccatgcctgaaggttggagatcttgtgtctggtggtgatatcattggctcagtggtggagaactctctcatgtacaatcacagcattatgattccgcccaatgtgcggggccgtgttacttccattgttccttcaggaaattacaccctccaagatgacattattgaattggaatataatgggacagtgaaatcactaaaacttatgcatcgctggccagtacggaccccgcgtcctgtggcgtcaaaagaatccggcaatcatccgcttctcaccggacagcgtgtgctcgatgctctctttccatccgtccagggtggaacatgcgccatccctggcgcgtttggatgcggaaagacggttatcagtcaggctctttcgaagttctccaacagcgacgctgttatctatgtcggctgcggcgagcgtgggaatgagatggcagaggtgctcatggacttccccacactcaccaccgttattgatggtcgtgaggagtccatcatgaagcgtacctgcctggtggcaaacacctcaaatatgcctgtcgctgctcgtgaggcgtctatttacactggcatcactttagctgagtattatcgtgatatgggcaagcacattgctatgatggccgactctacctctcgatgggctgaggctctccgtgagatctctgggcgtctcgctgaaatgcccgctgatggtggttaccctgcgtacctcagtgcgcgtcttgcttccttctacgagcgtgcggggcgcgtgacatgcatcggtgggccaaaacgcgagggctcagtaaccatcgttggtgccgtttctcctcctggaggtgacttttctgacccagtgacgtccgctacgcttggtattgtgcaagtcttttggggtcttgagaagcgtcttgcgcaacgtaaacactttccttctgttaattggctcatttcctattcaaaataccttaatgctttggagcccttcttcaacacgcttgaccctgactacatgcgcctgcggtcagttgctgcggagatccttcagcgtgaggaagagttgcaagaaattgttcaacttgtcggtaaggactcactttcggagtctgacaaaattattctagaaacggctaaggttattcgtgaagagtttctccagcagaatgcctttacgccgtacgacaagtattgcccgccgtacaagacctgctggatgctacgtaacattgtcgcgttctacgaggagagccagcgcgttgtagctgagtccgctggggaacttaagattacgtggaactacattcgtgaaatgattcctcatatttacacgggtttaactgagatgaagttccgtgatcctcaggagggtgaggaggccaacgtagaattctacagaaaacaaaatgaggaaattgtcagcgcattcgcctcgctgctgcaataa

SEQ ID NO: 693 - DNA, 1758 bp, Thermus thermophilus
  strain HB8
atgatccaaggggtgatccagaagatcgcgggcccggcggtgatcgccaagggcatgctcggggcccgcatgtacgacatctgcaaggtgggcgaagagggcctcgtgggcgagatcatccgcctggacggggacacggccttcgtccaggtctacgaggacacctcgggcctaaaggtgggggagcccgtggtctccacgggccttcccttggcggtggagctcggccccgggatgctgaacggcatctacgacggcatccagcgccccctggagcgcatccgggagaagacggggatctacatcacccggggcgtggtggtccacgccctggaccgggagaagaagtgggcctggacgcccatggtcaagcccggggacgaggtgcgggggggtatggtcctgggcacggtgcccgagttcggcttcacccacaagatcctggtacccccggacgtgcggggccgggtcaaggaggtgaagcccgccggggagtacaccgtggaggagccggtggtggtcctcgaggacggcaccgagctcaagatgtaccacacctggcccgttcgccgggcgaggcccgtgcaaaggaagcttgaccccaacacccccttcctcacggggatgcgcatcctggacgtcctcttccccgtggccatggggggcaccgccgccatccctgggcccttcggcagcggcaagaccgtgacccagcagtccctggccaagtggtccaacgccgacgtggtggtctacgtgggctgcggggagcgggggaacgagatgaccgacgtgctcgtggagttccccgagctcaccgaccccaagacgggtgggcccttgatgcaccgcaccgtcctcatcgccaacacctccaacatgcccgtggccgcccgcgaggccagcatctacgtgggcgtgaccatcgccgagtacttccgcgaccagggcttctccgtggccctcatggccgactccacgagccgctgggccgaggctttgcgcgagatctctagccgcctcgaggagatgcccgccgaggagggctacccgccctacctcgccgccaggctcgccgccttctacgagcgggcgggcaaggtcatcaccctgggcggcgaggagggggcggtgaccatcgtgggggccgtctccccgccgggcggcgacatgtccgagcccgtgacccagtccaccttgaggatcgtgggggccttctggcggcttgacgcctccctggccttccgccgccacttccccgccatcaactggaacggctcctacagcctcttcacctccgcccttgacccctggtaccgggagaacgtggccgaggactaccccgagctccgcgacgccatctccgagcttttgcagcgggaggcgggcctccaggagatcgtccagctcgtggggccggacgccctccaggacgccgagcgcctcgtcattgaggtgggccggatcatccgcgaggacttcctgcagcagaacgcctaccacgaggtggacgcctactgctccatgaagaaggcctacgggatcatgaagatgatcctcgccttctacaaggaggcggaggcggccatcaagcggggggtttccatagacgagatcctgcagctccccgttctggagcgcatcggccgcgcccgctacgtgagcgaggaggagttccccgcctactttgaggaggccatgaaggagatccagggggccttcaaggctggcctaaagggggagagatggaccttctga

SEQ ID NO: 694 - DNA, 21 bp, Artificial Sequence
  Synthetic DNA Sequence
  modified_base (7): i
cggcgcnatcytsgttgttgc

SEQ ID NO: 695 - DNA, 20 bp, Artificial Sequence
  Synthetic DNA Sequence
gtttcacgtgatgacgtaca

SEQ ID NO: 696 - DNA, 26 bp, Artificial Sequence
  Synthetic DNA Sequence
  modified_base (3): i
  modified_base (6): i
  modified_base (12): i
  modified_base (21): i
atnggncayrtngaycayggnaarac

SEQ ID NO: 697 - DNA, 23 bp, Artificial Sequence
  Synthetic DNA Sequence
  modified_base (3): i
  modified_base (6): i
  modified_base (9): i
  modified_base (12): i
ccnacngtncknccrccytcrcg

SEQ ID NO: 698 - DNA, 1185 bp, Escherichia coli
gtgtctaaagaaaaatttgaacgtacaaaaccgcacgttaacgttggtactatcggccacgttgaccacggtaaaactactctgaccgctgcaatcaccaccgtactggctaaaacctacggcggtgctgctcgtgcattcgaccagatcgataacgcgccggaagaaaaagctcgtggtatcaccatcaacacttctcacgttgaatacgacaccccgacccgtcactacgcacacgtagactgcccggggcacgccgactatgttaaaaacatgatcaccggtgctgctcagatggacggcgcgatcctggtagttgctgcgactgacggcccgatgccgcagactcgtgagcacatcctgctgggtcgtcaggtaggcgttccgtacatcatcgtgttcctgaacaaatgcgacatggttgatgacgaagagctgctggaactggttgaaatggaagttcgtgaacttctgtctcagtacgacttcccgggcgacgacactccgatcgttcgtggttctgctctgaaagcgctggaaggcgacgcagagtgggaagcgaaaatcctggaactggctggcttcctggattcttatattccggaaccagagcgtgcgattgacaagccgttcctgctgccgatcgaagacgtattctccatctccggtcgtggtaccgttgttaccggtcgtgtagaacgcggtatcatcaaagttggtgaagaagttgaaatcgttggtatcaaagagactcagaagtctacctgtactggcgttgaaatgttccgcaaactgctggacgaaggccgtgctggtgagaacgtaggtgttctgctgcgtggtatcaaacgtgaagaaatcgaacgtggtcaggtactggctaagccgggcaccatcaagccgcacaccaagttcgaatctgaagtgtacattctgtccaaagatgaaggcggccgtcatactccgttcttcaaaggctaccgtccgcagttctacttccgtactactgacgtgactggtaccatcgaactgccggaaggcgtagagatggtaatgccgggcgacaacatcaaaatggttgttaccctgatccacccgatcgcgatggacgacggtctgcgtttcgcaatccgtgaaggcggccgtaccgttggcgcgggcgttgttgctaaagttctgggctaa

SEQ ID NO: 699 - DNA, 26 bp, Artificial Sequence
  modified_base (3): i
  modified_base (6): i
  modified_base (21): i
  modified_base (24): i
  Synthetic DNA Sequence
gtnacnggytcytyrarrttnccncc

SEQ ID NO: 700 - DNA, 24 bp, Artificial Sequence
  Synthetic DNA Sequence
  modified_base (2): i
  modified_base (5): i
tnrtngaygtcgarttccctcarg

SEQ ID NO: 701 - DNA, 21 bp, Artificial Sequence
  Synthetic DNA Sequence
gtgttcacgatcatcgatgcg

SEQ ID NO: 702 - DNA, 20 bp, Artificial Sequence
  Synthetic DNA Sequence
ctctcgatatccgcgaagcg

SEQ ID NO: 703 - DNA, 20 bp, Artificial Sequence
  Synthetic DNA Sequence
tatggaaattcgaaacatct

SEQ ID NO: 704 - DNA, 20 bp, Artificial Sequence
  Synthetic DNA Sequence
agtgctccaattaatgttgg

SEQ ID NO: 705 - DNA, 20 bp, Artificial Sequence
  Synthetic DNA Sequence
gtacagttccaatacctgaa

SEQ ID NO: 706 - DNA, 20 bp, Artificial Sequence
  Synthetic DNA Sequence
tgaaatcttcacatccaaca

SEQ ID NO: 707 - DNA, 25 bp, Artificial Sequence
  Synthetic DNA Sequence
twaccatttcagtaccttctggtaa

SEQ ID NO: 708 - DNA, 26 bp, Artificial Sequence
  Synthetic DNA Sequence
  modified_base (9): i
  modified_base (12): i
  modified_base (15): i
  modified_base (18): i
  modified_base (21): i
  modified_base (24): i
tcrtccatnccnarnatngcnatnat

SEQ ID NO: 709 - DNA, 1656 bp, Borrelia burgdorferi
atgaatgaagttttatttgtaaagactgctggtaggaatttaaaagcagaagtaattcgtattaggggcaatgaagttgatgcacaggtttttgaattgacaaaagggatatctgttggagacctagttgaatttacagacaaacttttaacagttgaactcggaccagggcttttaactcaagtatatgatgggcttcaaaatcctttgcctgaattggctattcaatgtggattttttttagaaaggggagtatatttaaggcccttgaataaagataaaaagtggaattttaaaaaaacctccaaagttggagatatcgttattgcaggagattttttaggttttgtaattgagggaactgttcaccatcaaataatgattccattttataaaagggattcttataaaattgtggagattgtaagtgatggcgactattcgattgatgagcaaattgctgtaattgaagatgattctggtatgaggcataatattacaatgtcttttcattggcctgttaaagttcctattactaattataaggaacgccttattcctagtgaacctatgttgactcaaactagaattatagatacatttttcccagttgccaaaggtggaactttttgcattccgggtccttttggagcaggaaaaacggttcttcagcaggttacaagtcgaaatgctgatgttgatgtagtgattattgcagcttgtggtgagcgagcaggagaagtggtagaaactcttaaagaatttcccgaattaatggatccaaaaaccggcaaatctttaatggacaggacttgtattatttgtaatacatcttcaatgccagttgcagctagagaagcttctgtttatactgctattactattggtgagtattacaggcaaatgggccttgatattcttcttttggcagattcaacttcaagatgggctcaagcaatgagagaaatgtctggacgccttgaggaaattcctggcgaggaggcttttccggcatatcttgagtctgttattgcttccttttatgaaagggcaggtattgtagttcttaataatggggatattggatctgtaacagttggtggctctgtaagtcctgctggtggtaattttgaagagccagttactcaagcaactttaaaagttgtaggagcatttcacgggcttacaagagaaaggtctgatgctaggaaatttccagctattagtcctcttgaatcttggagtaaatataaaggcgttattgatcaaaaaaagactgaatatgcaagatcttttttggtgaaaggtaatgaaattaatcaaatgatgaaagttgttggagaagaaggcataagtaacgatgattttttaatttatttaaaatccgagctacttgattcgtgctatttgcagcaaaattcatttgattctattgatgctgctgttagttcagagcgtcaaaattatatgtttgatatagtttataacattcttaaaactaactttgagttttctgataaacttcaagcaagagattttataaatgagttaaggcaaaatcttttagacatgaatctttcttcttttaaggatcataagtttaataaattggagcatgctttgggtgaattgataaattttaaaaaggtaatttag

SEQ ID NO: 710 - DNA, 1818 bp, Treponema pallidum
  strain Nichols
gtgatcaaagacgatgtggttacaggccgtgtagtgagggtgtctggtcccattgtgtatgccgagggcctctctgcgtgcagcgtatacgatgttgtcgacgtaggggaagcatcgctcatcggagaaattatccggttggatgagagcaaggcggtcgtgcaagtatacgaggatgacacaggtatgcgagtcggggagaaggtgacaagcttgcgtcgaccactctcagtccgcttagggcctggattaatcggcaccatttatgacggtattcagcgcccacttgagcgcctcttccaagaagacggcgccttcttgcgtcctggtgcgcgttcacaaccgcttgatggctccgtacgctgggattttcgtcctcattgtaacgagcgcggtgaggccctgtgcgcggggattccgattgcacctgggtcagtgttagggaccgtgcaggagactccttctgttgtgcacactatcatggttcctcctgacatccgggggagcgtgctatcttcgttcaagggcgcaggtgcttacacaatagatgaagaaattggacgcactgatcttggtgagccgctttttctatcccagtactggccagtgcgtcgtgcgcgtcctttcagcaaaaaacttgcagtgtgtgagccactagttactggacagcgggcgattgatgttttcttccccctatcaaagggaggaacggcggctattccagggggatttggaactgggaagacaatgacgcagcatgccgttgccaagtggtgtgatgcagatattatcgtgtacatcggctgcggagagcggggcaacgagatgacagacgtgctctctgaatttcccaaactcatcgatccgcgcacaggacgctctcttatggagcggacgattttgatcgcaaatacgtccaatatgcctgtgtccgcacgcgaggtgtcgctgtattcagggattacccttgcggaatactaccgtgatatgggtatgcatgtggccatcatggctgattctaccagccgctgggcggaggcgctgcgtgaattgtctgggcgcatggaagaaatgcctgcggaggagggattccctgcgtaccttccgacgcgtcttgcagaattttatgagcgcgcaggacgcgtggaaacctgtgtggcgcgcgagggctctgtgagcatcattggtgctgtttctcccctgggtggagatttctctgagccggtgacgcagcacacaaagcgcttcatccgttgcttttgggccttggatcgtgaacttgcacacgcgcgtcattaccctgccattgggtggatagattcatactctgaatatgcgcaggaagtaagtgcatggtggagtaagtatgacccgcgcgcaggcgcgttgcgcgccgcagccttggatttgctgagaaaggaacagcggttacagcaaattgtcaggcttgtcggtcctgatgcgctgcctggagaagatcgtctggtgctaatggtgtgtgaaatgatcaaaggtggctttctgcagcagaacgcttttgatccgacggatgtgttctcctgtcccgaaaagcaggtgcagatcttgcgtaccatagtggattttcacgaacgtgccgtggtgctgctgcgtgcaggtatttcgctttctgcgctgtcccagctttcgtgccgggagctcatcgtacgtatgaaaactacgtacgggaatgaggatgtacacaagatgcagaaagtgtacgacacgatgtgcactgagtttgaccaactgagtgtgtgtgctgccgcgcgcacacaagggggggagaaagtcgaatga

SEQ ID NO: 711 - DNA, 1779 bp, Chlamydia trachomatis
  strain MoPn
cagggctatgtcgtagaagcttacggaaatttattgcgggtgcattttgatgggcatgtgcgtcaaggagaagtggcctatgtcagcgtggatgatacttggttgaaagcggaaattatagaagttgtgggagatgaggttaaagtccaagtttttgaggaaactcaaggaatttctcgaggcgctttggtaactttttccgggcatttattagaagcggaacttgggcccggtctattgcaaggtatttttgacggacttcagaatcgcttagaggtattggcagatacaagcttgttcttgaaaagaggggagtatgttaatgccatttgtcgggaaactgtatgggcttatacgcaaaaggcttctgtcggggatgttctatctcggggagatgtgcttggtacagtaaaggaagggcggtttgatcataaaatcatggttcctttctcttgttttgaggaagtgactatcacttgggtcatttcttcaggagattacactgttgataccgttattgctaaaggacgtactgcttcaggagccgagcttgaatttacaatggttcagaaatggcccattaaacaggcttttttagaaggggaaaaggtaccgtctcatgaaattatggatgttgggttacgagtattagatactcagatccccgtcttaaagggaggaactttttgtactccagggccttttggtgcaggaaagaccgttttacagcaccatttatctaagtatgcagctgtagatatcgtagttttgtgtgcttgtggagagcgagctggagaggttgtagaaattcttcaggagttcccgcatttgacagatcctcatacggggcagtctttgatgcataggacctgtattatttgtaatacatcttccatgcctgtagcagctagagagtcctccatttatttgggtattactatagcagaatattaccgtcaaatggggttgcatgttttgttattggctgactcgacatctagatgggctcaagctttaagggaaatttcagggcgattagaagaaatccctggagaagaagctttcccagcctatttggcgtctcgaatagcagctttttatgagcgaggcggggctgtgaaaatgaaagatggatcggaaggctccttgactatctgtggagcggtttctcccgcaggaggaaattttgaagagcctgttacacaagcaactttatctgttgttggggctttctgtgggctttctaaggctagagcagatgctagacggtatccttctattgatccgatgatttcatggtctaagtacttggattctgtggcggagattttagagaaaaaagttccaggatggggagattccgttaaaaaagcttctcgtttcttagaagaaggagcagaaattggtaagcgaatagaagttgttggggaagaagggatttctatggaagatatagaaatctttttgaaatcagagttgtatgatttctgttacttacagcaaaacgctttcgatgcagaggactgttattgtccttttgatcgtcaaatagagcttttttctttaatgagtcatatttttagctctagattctgttttgattgtccagataatgctcggagtttctttttagagcttcaaagtaaaattaaaacgctgaatggtcaaaaattcctttctgaagactatcagaaggggctagaagtgatctataaactattagaaagcaaaatggtgcagacggcgtaggtatgcaaacaatatatacaagaattacgg

SEQ ID NO: 712 - DNA, 965 bp, Enterococcus faecalis
  strain V583
gtgcaaattggaaaaattgtcaaagtttcaggtcctttgattttagctgaaaacatgtcagatgctagtatccaagacatttgtcatgtaggagatttaggcgttatcggagagattattgaaatgcgaggcgacgtcgcttcgattcaagtatatgaagaaacaacaggcattggaccaggagaaccagttatttcaacaggagaaccattatctgttgaattagccccaggtttaattgccgaaatgtttgatggtattcaacgaccattggatacatttcaagaagtaacccacagtaactttttaggccgtggcgttaaaattgatgcgttagatcgtgagaaaaaatggacgtttgaaccaactgtggcagttggtgaagaagtgtcggcaggtgacatcgtcggtgtggttcaagaaacaccgattattcaacataaaattatggtgcctttcggcgtttcaggaacgattgccgaaattaaagcaggtgactttgccattgatgaaacagtttactcagtggaaacggctaaaggaacggaaagttttagcatgatgcaaaaatggcccgttcggcggggacgtcccattttagaaaaactaagtcccaaagtaccgatggtgaccggacaacgcgtaattgatacctttttcccaattacgaaaggcggagcggcagcagttccaggaccatttggcgctggaaaaacagtcgttcagcaccaaattgctaagtgggccgatgtcgacttagtcgtttacgttggttgtggggaacgcgggaatgaaatgacagatgttttaaatgaatttccagaattaattgacccaacaactggtgagtctttgatgaatcggacgattttaattgcgaatacgtcaaatatgccggtagcggcacgggaagcctcgatttatacagggattaccattgcagaatatttccgtgatatgggtta

SEQ ID NO: 713 - DNA, 1737 bp, Methanosarcina barkeri
gtggaagtaaaaggtgaaatttatcgtgtgtctgggcctgtcgtcaccgccatcggcttgcaggcaaaaatgtatgacctggtcaaagtcggtaatgaaggtttaatgggtgaagtcattcagatattagggcccaagaccatcatccaggtatatgaagagaccgcaggtatcaagccaggggaaccctgtgtatctacagggtcgtctctgtccgtagaacttggtccgggtcttctttccagtatttatgacggggttcaaaggcctctgcacgtcctgcttgaaaaaatgggtagcttcatccagagaggtgtcagcgcagatgggcttgatcataagaaactctgggatttcaaacccattgtcaagaagggcgattccgtaaaaggtggagacgtaattggtgttgtacaggaaaccgtgaatattgaacataagatcatggtgcctcctgatatctcaggtacaatttccgacataaagagcggaaactttacggtagtagacacaatctgtactctgactgatgggaccgaattgcagatgatgcagaggtggcctgttcgaagacccagacctgtgaaggcaaaacttactccaaccaggcctctggttacaggaatgagaatccttgatgggcttttccctgtggcaaaaggcggaacagctgcaatccccggacctttcggatcgggaaagaccgtaactcagcagtcgcttgcaaaatggagtgataccgaaattgtggtctacatcggttgtggtgagcgtggaaacgaaatggcagatgttctgagcgaattccctgaactcgaagatccgcagaccgggcgcccacttatggagcgtactgttcttatcgctaacacttcaaacatgcctgtggccgcaagagaagcatctgtgtataccggaatcaccattgcagaatactaccgtgacatgggattagatgtatcccttatggcagactccacctcaaggtgggcagaagccatgagagaaatctcttcccgtctggaagaaatgcctggtgaagaaggttacccagcatacctgtctgcaagactggccgaattctacgagcgtgccggggttgcggagagtctttgcggcgaaacaggttccattactgttattggagcagtatctccacctggcggtgacttctcagagcctgttacacagaataccctgcgtatcgtaaaagtgttctgggctctcgatgccaaactatctcagaggcgtcacttcccggccatcaactggctgaacagttacagtctgtataaggacagtcttaatgactggtttgcagataatgtggctcctgattatgtgcctttgagggaaagagcaatggaaatgctccagacagaatctgaactgcaggaaatcgtgcagcttgtaggttccgatgctctgccagacgaccagcagcttctgcttgaaatcacccgtatgcttagggaaattttcctgcagcagaatgcattccacccagtagatgcatacagcccgttcgatcagcagtacaagatccttaaggcaatcatgaaatggggagacgctgcgatggatgccttgaaatcaggtgttcccgtaactgaaattatcaagcttgaatccaaaaatgtgcttgctaaggtcaagtacgaagagaagtttgatgagtctatgaatgctgtcctggcacagatggataaagagtttgcatccctgagaggtaggtaa

SEQ ID NO: 714 - DNA, 1785 bp, Methanosarcina jannaschii
atgaaaagagaggttgagaatatgccagttgttggtaagattattaaaatcgcagggcctgttgtagttgcagagggaatgaaaggagctcagatgtatgaggtcgttaaagtaggagaagagaaattgactggagaaatcattcagttgcacgatgataaagcagttattcaggtttatgaagaaacatctggaattaaaccaggagagccagttgttggtactggagctccattgtctgttgaattagggccagggatgttaagagctatgtatgatggtattcagaggcctttaacagcaattgaagagaaaacaggttcaatctttatcccaagaggagttgatgtccctgcattaccaagagatataaaatgggaatttaaaccagtggtaaatgaaggagattatgttgaagaaggagacataattggaactgttgatgaaactccttcaatagttcataaaatcttagttccaattggtgttaaaggaaaaattgttgaaataaaagagggtaaatttacagttgaagagacagttgcagttgtagaaacagaaaatggagaaaggaaagaaattacaatgatgcaaaaatggccagtaagaaaaccaagaccatataaagagaaactacctccagaaattccattaattacagggcaaagagttgaagacactttctttacattagcaaaaggaggaacagcagcaattccaggtccattcggttcaggaaaaacggttactcagcatcagttggcaaagtggtctgacgctgatgtcgttgtttatatcggatgtggagaaagaggaaacgagatgacagaggttattgaagagttcccacacttagaagatattagaactggaaacaaattaatggatagaactgtattaatagccaacacatcaaacatgcctgtcgctgcaagggaagcatctgtctatacaggaattacaattgcagagtacttcagagatatgggttatggagttttattaacagcagattcaacatcaagatgggcagaggcaatgagagaaatttcaggtagattggaagaaatgccaggggaagaagggtatccagcatacttagcttcaagattggctcagttctatgaaagagctggaagagttataaccttagggaaagataacagacaaggattcgtttgtatcgttggagctgtttcaccaccaggaggggacttctcagaaccagttacatcaaacacactaaggatagttaaggtattctgggcgttagatgcaaacttggcaagaagaagacacttcccagctatcaactggttgcagagttattcattatacattgatgatgttacagagtggtggaacacaaatactggtccagattggagacaattaagagatgaagcaatgagcttattacaaaaagaggcagagttgcaagagattgttcagttagttgggcctgatgcattgccagatagggagagagttattttagaagttgcaagaatgttgagggaggatttcttacagcaagatgcgtttgatgaggtagatacctactgtcctccaatgaaacagtacttaatgttaaagataattatgacattctaccaagaagcattgaaggcagttgaaagaggagttgaaccagctaagattttaggagtttcagttaagcaagatattgcaagaatgaaatacatcccacacgatgagtttataaatgttaaatcaaaagaaataatggagaaaattaagaatgaattaggttcattaaactaa

SEQ ID NO: 715 - DNA, 1354 bp, Porphyromonas gingivalis
  strain W83
tgagcgaggtgatcaaggtgatcggcaaaaatgcttatgtgcaggttttcgaaagtactcgcggtatgcacgtaggagatgaggcagagtttaccggcagtatgcttgaggtaacgctcggccccggtatgctttcgaagaactacgacggtctgcaacacgacttggacaagatggacgggatcttcctcaaacgaggcgattatactcccgctctcgatgacgacaagctgtgggacttcaagcctttggccaatgtgaacgacaatgtgatcgcaggctcatggctcggagaggtgacggaaaatttccaaccgcacaagatcatggtacctttcgttttcgaaggcaattacaaggtgaagagtctggccaaagccggttcgtacaaagtgaacgatgtgatcgctgtggtaacggatcaggacgggaaagaccacaatgtaaccatggtgcagaaatggccggtgaaacgtgctatcacttgctatcgcgagaagccgcgtcctttcaaactgctcgaaacgggtatccgtatcatcgacactttcaaccccatcgtagagggtggtacgggatttatccccggtcctttcggtacgggaaagacggtgctccagcatgctatctcgaagcaggcggaagccgatatcgtgatcattgcagcctgtggcgagcgtgcaaacgaggttgtggagatctttgcggaattcccccacctgaatgacccccacacgggacgtaaattgatggaacgtaccattattattgctaatacgtcgaatatgcctgtggcttcgcgtgaggcatccgtatatacggccatgacgatagccgagtactatcgctccatgggccttcgcgtgctgatgatggcagactccacttcgcgttgggcacaggctctgcgtgagatgtctaaccgtctggaagagcttcccggaccggatgctttcccgatggacttgtcagctatcgtagccaacttctacgctcgtgcaggatacgtttacctgaacaacggttcggccggttcggtaacgttcatcggtacggtatctcccgccggtggtaacctcaaagagcctgtgacggaaaacaccaagaaagtggctcgctgcttctatgctttggagcagaatcgtgccgaccgcaaacgttatccggctgtaaaccccatcgatagttactcgaagtacatcgaatatcccgaattcgagagctatatatcgaaccacatcagtttactcattatattcaacagaagttggcagatatatggatcaaatcttacagcagactggactactaaggtgaatgagctgaagatgcgcttgcatcagggtaaagaaat

SEQ ID NO: 716 - DNA, 1788 bp, Streptococcus pneumoniae
  strain Type 4
tttgactcaagggaagattataaaagtatcgggacctctagttattgcatcaggtatgcaggaggctaatattcaagatatttgccgtgtaggtaagctagggttaatcggtgaaattattgaaatgagaagagatcaggcatctatccaagtctatgaagaaacatctggtcttggtccgggagaacctgttgttacaactggagaacctctctcggttgaattagggccaggattgatttctcaaatgtttgatggcatacaacgcccattagatcgatttaaattggctactcataatgattttctagttcgtggggtagaagttccaagtttggatagagatattaagtggcattttgattccactatagcaattggtcaaaaagtgagtacgggtgatattcttggaactgtcaaggaaaccgaggtagttaatcataaaattatggttccttatggagtatctggagaagtcgtttctattgcatctggcgattttacaattgatgaagttgtatatgaaataaaaaaattggacggtagtttctataaaggaacgcttatgcaaaaatggcctgtccgcaaggcgcgtcctgtttctaaacgtttaattccagaagaaccattaatcacaggtcaacgagttattgatgcattctttccagtaaccaaagggggagctgcagcagttcctggaccgtttggagcaggaaagacagttgtacaacaccaagtagctaaatttgccaatgttgatattgttatttatgtcggttgtggagaacgtggaaatgaaatgacggatgtactgaatgagtttcctgagttgattgaccctaataccggacaatcaattatgcaacggacagttctgattgctaatacttcaaatatgcctgttgctgctcgtgaggcttcaatttatacaggaattaccatggctgagtattttcgtgatatgggctactctgtcgccattatggctgattcaacttcacgttgggcagaagcgctacgtgaaatgtcaggacgtctagaagaaatgcctggtgatgagggttatcctgcttatctgggaagtcgtatcgctgaatattatgaaagagcaggacgttctcaggttctagggcttccagaacgtgaaggaacgattactgctattggagctgtatcgccacctggtggagatatttcagaaccagttactcaaaacactttacggattgtgaaagttttttgggggcttgatgctccgttggcacagcgacgtcattttcctgcaattaactggcttacatcttattcactatataaagacagtgtgggcacttatatagatggtaaagagaagacagattggaatagtaaaataactcgtgcgatgaactacttacaacgggaatctagtttagaggaaattgttcgtcttgttggaattgattctctgtctgataatgaacgactaacgatggaaattgctaaacaaattcgagaagattatttgcaacagaacgcttttgattcggtagatacattcacttcgtttgcaaaacaagaagcaatgctaagtaatattctcacttttgctgatcaggcaaatcatgctttagagttgggttcttactttacagagattatggaaggtaccgtggcagttcgagaccgtatggcgagaagtaaatatgtttcagaagatagattagatgaaatcaaaattatatcaaatgagattacacatcaaattcatttgatattagaaacaggaggtctataaatgagtgttat

SEQ ID NO: 717 - DNA, 823 bp, Burkholderia mallei
  strain GB8
cgatcctggtgtgctcggccgctgacggcccgatgccgcaaacgcgtgagcacatcctgctggcgcgtcaggtcggtgtgccgtacatcatcgtgttcctgaacaagtgcgacatggtggacgacgcggagctgctcgagctggtcgaaatggaagtgcgcgaactgctgtcgaagtacgacttcccgggcgacgacacgccgatcatcaagggttcggcgaagctggcgctggaaggcgacaagggcgagctgggcgaagtggcgatcatgaacctggccgacgcgctggacacgtacatcccgacgccggagcgtgcggtcgacggcgcgttcctgatgccggtggaagacgtgttctcgatctcgggccgtggtacggtggtgacgggtcgtgtcgagcgcggcgtgatcaaggttggcgaggaaatcgaaatcgtcggtatcaaggcgacggcgaagacgacctgcacgggcgtggaaatgttccgcaagctgctggaccagggtcaggcgggcgacaacgtcggtatcctgctgcgcggcacaaagcgtgaagacgtggagcgcggccaggttctggcgaagccgggttcgatcacgccgcacacgcacttcacggcagaagtgtacgtgctgagcaaggacgaaggcggccgccacacgccgttcttcaacaactaccgtccgcagttctacttccgtacgacggacgtgacgggctcgatcgagctgccgaaggacaaggaaatggtgatgccgggcgacaacgtgtcgatcacggtgaagctgatcgcgccgatcgcgatggaagaaggtctgcg

SEQ ID NO: 718 - DNA, 824 bp, Burkholderia pseudomallei
  strain 1026B
gcgatcctggtgtgctcggccgctgacggcccgatgccgcaaacgcgtgagcacatcctgctggcgcgtcaggtcggtgtgccgtacatcatcgtgttcctgaacaagtgcgacatggtggacgacgcggagctgctcgagctggtcgaaatggaagtgcgcgaactgctgtcgaagtacgacttcccgggcgacgacacgccgatcatcaagggttcggcgaagctggcgctggaaggcgacaagggcgagctgggcgaagtggcgatcatgaacctggccgacgcgctggacacgtacatcccgacgccggagcgtgcggtcgatggcgcgttcctgatgccggtggaagacgtgttctcgatctcgggccgtggtacggtggtgacgggtcgtgtcgagcgcggcgtgatcaaggttggcgaggaaatcgaaatcgtcggtatcaaggcgacggcgaagacgacctgcacgggcgtggaaatgttccgcaagctgctggatcagggtcaggcgggcgacaacgtcggtatcctgctgcgcggcacgaagcgtgaagacgtggagcgcggccaggttctggcgaagccgggttcgatcacgccgcacacgcacttcacggctgaagtgtacgtgctgagcaaggacgaaggcggccgccacacgccgttcttcaacaactaccgtccgcagttctacttccgtacgacggacgtgacgggctcgatcgagctgccgaaggacaaggaaatggtgatgccgggcgacaacgtgtcgatcacggtgaagctgatcgcgccgatcgcgatggaagaaggtctgcg

SEQ ID NO: 719 - DNA, 800 bp, Clostridium beijerincki
  ref <308>: DATABASE ACCESSION NUMBER: ATCC 8260
tgtatcagcagcagatggtccaatgccacaaacaagagaacatatactactaggatcaagagttggtatccaatatatcgtagtattcttaaataaagcagatatggtagacgatccagaattattagaattagtagaaatggaagtaagagaattattaagcgaatatgacttcccaggagacgatattccagtaataacaggatcagcattaaaagcattagaaaatccaacagatgaagaagcaattaagccaatcatggatttaatggaagcagtagatagctatatcccaactccagaaagagcaacagataagccattcttaatgccaatcgaagatgtattcacaattacaggaagaggaacagttgcaacaggaagagttgaagctggagtacttcatgtaggagatgaagtagaaatcgttggattaacagaagaaaagaagaaagttgtagtaactggaatcgaaatgttcagaaagttattggatgaagcacaagctggagataacatcggagcattattaagaggagttcaaagaactgatattgaaagaggtcaagttttatcaaaaccaaattcagtacaccctcacactaaatttgtaggtcaagtatacgtacttaaaaaagaagaaggtggaagacatactccattctttgatggatacagaccacaattctatttcagaacaacagacgttacaggrtcaatcaagttaccagatggaatggaaatggtaatgcctggagatcacattgatatgaatgttgaattaatcactccaatcgcaa

SEQ ID NO: 720 - DNA, 799 bp, Clostridium innocuum
  ref <308>: DATABASE ACCESSION NUMBER: ATCC 14501
ggtgctatcctggttgttgctgcatctgatggtcctatgcctcagactcgtgagcacatcctgcttgctcgtcaggtaggtgttccttacatcgttgtattcctgaacaaatgcgacatggttgatgacgaagaactgatcgaccttgttgaaatggaagtacgtgagctgttaagcgagtacggattcgacggagataacgctccggttatccgtggttctgcactgaaggctctggaaggtgacgacaaatacgttggcgctatcaaagaactgatggatgcagttgatgaattcatcccagatccaactcgtgaaactgacaaaccattcctgatgtctgtagaagacgttatgacaatcacaggacgtggtacagttgctacaggacgtgttgagcgtggggtagtaaaactgggagaagaagttgaaatcgttggtatcaaggatactcagaaaactgttgttaccggactggaaatgttccgtaagcagctggacttcgcagaatccggagacaacatcggtgctctgctgcgtggtatcaaccgtgaccagattcagcgtggacaggttcttgctaaaccaggatccgtacatccacacacaaagttcaaggctcaggtttatgtattaacaaaagaagaaggtggacgtcacactccattcgtttctaactaccgtcctcagttctacttccgtacaactgacgtaactggtgttattacattaccggaaggaactgaaatggttatgcctggtgacaacgttgaaatgaacgttgagctgattgctccaa

SEQ ID NO: 721 - DNA, 789 bp, Clostridium novyi
  ref <308>: DATABASE ACCESSION NUMBER: ATCC 19402
ttgtatcagcagcagatggtccaatgccacaaacaagagaacacatcctattagcatcaagagtaggagttaaccacatagtagtattcttaaacaaagcagaccaagtagatgatccagaattactagaattagtagaaatggaagtaagagaattattaagcgaatacggatttgacggagacgaatgtccagtagtagtaggatcagcattaaaagcaatcgaagaaggggatgaccaatgcatcctagacttaatgaaagctgtagatgaatatatcccaactccagaaagagcaacagatcaaccattcttaatgcctgtagaagatgtatttacaattacaggaagaggaacagttgcaacaggaagagttgaaagaggagtactacacgtaggagatgaagtacaaatcgtaggaatgaaagaagaaatcggaaagacaacaatcacaggagtagaaatgttcagaaagatgttagatgaagcaatggctggagataacatcggagcattattaagaggagtacaaagagacgaaatcgaaagaggtcaagtactagcaaaaccaggttcagtaacacctcacaaaaaattcgtaggtcaagtttacgtattaaagaaagaagaaggtggaagacacactccattctttaacggatacagaccacaattctacttcagaacaacagacgtaacaggatcaatcgctttaccagaaggagtagaaatggtaatgccaggagaccatatagacatgaacgtagaattaatcacaccagtagcaa

SEQ ID NO: 722 - DNA, 798 bp, Clostridium septicum
  ref <308>: DATABASE ACCESSION NUMBER: ATCC 12464
gttcagcagcagacggtccaatgccacaaacaagagaacatatactactagcatcaagagttggtgttgactatatcgtagtattcttaaacaaggcagatatggtagatgacgaagaattattagaattagtagaaatggaagttagagaattattatcagaatacaacttcccaggagatgatattccagtaatcaagggatcagctttagtagcattagaaaacccaacagatgaaaaatcaatcgctccaatcttagaattaatggaagcagtagatagctacattccaacaccagaaagagcaacagataagccattcttaatgccagtagaagatgtattcacaataactggtagaggaacagttgcaacaggaagagttgaaagaggagttcttcatgtaggagacgaagtagaaatcgttggattatcagaagaaagcagaaaagtagtagtaacaggaatagaaatgttcagaaagttactagacgaagcacaagctggagataatgttggagtacttttaagaggtgttcaaagaacagatatcgaaagaggtcaagtattagcaaagactggatcagttaagccacacagcaagttcgtaggtcaagtatacgtacttaagaaagaagaaggtggaagacatactccattcttcgatggatacagaccacaattctacttcagaacaacagacgttactggatcaatcaaattaccagacggaatggaaatggttatgccaggagaccacattgatatgaacgttgaattaatcactcaagtagcaa

SEQ ID NO: 723 - DNA, 799 bp, Clostridium tertium
  ref <308>: DATABASE ACCESSION NUMBER: ATCC 14573
gttcagcagcagatggtccaatgcctcaaacaagagaacacatactactagcttcaagagttggtgttgactacatagttgttttcttaaacaaggcagatatggtagatgacgaagaattattagaattagttgaaatggaagtaagagaattattatcagaatacaacttcccaggagatgatattccagtaataaagggttcagctttacaagcattagaaaacccaacagatgaaaaagcaatcgctccaatccttgagttaatggaagctgtagatagctacattccaactccagaaagagcaacagataagccattcttaatgccagtagaagatgtattcacaatcactggtagaggaacagttgctacaggaagagttgaaagaggagttcttcacgtaggagacgaagtagaaatcgttggattatcagaagacagcagaaaagtagtagtaacaggaatagaaatgttcagaaagttactagacgaagcgcaagctggagacaacgtaggagttcttttaagaggagttcaaagaactgacatcgaaagaggtcaagttttagcaaaagttggatcagttaagccacacaagaaatttgtaggtcaagtatacgtacttaaaaaagaagaaggtggaagacatactccattcttcgatggatacagaccacaattctacttcagaacaacagaygttactggttcaatcaagttaccagatggaatggaaatggttatgccaggagaccacattgatatgaacgttgaattaatcactcaagtagctat

SEQ ID NO: 724 - DNA, 801 bp, Clostridium tetani
  ref <308>: DATABASE ACCESSION NUMBER: ATCC 19406
tagtaagtgcagcagatggtccaatgccacaaacaagagaacacatactattagcatccagagttggagttgagcacatagtagtattcttaaataaagcagaccaagtagatgacgcagagttaatcgaattagtagaaatggaagtaagggaattaatgaacgaatacggattcccaggagatgacgcaccagtagtagtaggatccgcattaaaagcattagaaaatccagaagatgatgcagcaacacaatgcataatggacttaatggcagcagtagatgaatatataccaacaccagaaagagcaacagataagccattcttaatgccagtagaagatatcttcacaatcacaggaagaggaacagttgcaacaggaagagtagaaagaggaattctaaaagtaggagacgaaatagaaatcgtaggattaagtgatgaaagcaagaaatcagtaatcacaggaatagaaatgttcagaaaactattagatgaagcacaagcaggagataacatcggagcattattaagaggtgttcaaagagatgaaatccaaagaggtcaagtattagcagcaacaggatcagtaaaaccacataagagttttacaggtcaagtatatgtattaaagaaagaagaaggaggaagacacactccattctttaacggatacagaccacaattctactttagaacaacagacgtaacaggttcaatcgcactaccagaaggagtagaaatggtaatgccaggagaccacatagacatgaaggtagaattaataacaagagtagcaa

SEQ ID NO: 725 - DNA, 633 bp, Enterococcus malodoratus
  ref <308>: DATABASE ACCESSION NUMBER: ATCC 43197
tatgcctcaaactcgtgaacacatcttgttatctcgtaacgttggtgttccttacatcgttgtattcttaaacaaaatggatatggttgatgatgaagaattactagaattagttgaaatggaagttcgtgacttattgtcagaatacgacttcccaggcgacgacactccagttatcgctggttcagctttgaaagctttagaaggcgatgcttcatacgaagaaaaaatcttagaattaatggctgctgttgatgaatatatcccaacaccagttcgtgatactgacaaaccattcatgatgccagtcgaagatgtattctcaatcactggtcgtggaactgttgcaactggtcgtgttgaacgtggacaagttcgcgttggtgacgaagttgaaatcgttggtattgctgaagcaactgctaaaacaactgttacaggtgttgaaatgttccgtaaattgttagattacgctgaagcaggcgataacattggtgcattgttacgtggtgttgcacgtgaagacatccaacgtggacaagtattggctaaaccagcttcaatcactccacatacaaaattctctgcagaagtttacgttttaactaaagaagaaggcggacgtcatactcc

SEQ ID NO: 726 - DNA, 623 bp, Enterococcus sulfureus
  ref <308>: DATABASE ACCESSION NUMBER: ATCC 49903
cacgtgaacacatcttgttatctcgtaacgtaggtgttccttacatcgttgtattcttaaacaaaatggatatggttgatgacgaagaattattagaattagtagaaatggaagttcgtgacttattatcagaatacgatttcccaggcgatgacactccagttgttgcaggttctgctttgaaagctttagaaggcgacgcttcttacgaagaaaaaatcatggaattaatggctgcagttgacgagtacatcccaactccaactcgtgacactgacaaaccattcatgatgccagttgaggatgtattctcaatcactggacgtggtactgttgctacaggtcgtgttgaacgtggacaagttcgcgttggtgacgttgtagatatcgttggtatcgctgacgaaactgctcaaacaactgtaacaggtgttgaaatgttccgtaaattattagactacgctgaagcaggcgataacatcggtgctttattacgtggtgttgctcgtgaagacatccaacgtggacaagttttagctaaaccagcttcaatcactccacatacaaaattctctgctgaagtatacgtattaagcaaagaagaaggtggacgtcatactcca

SEQ ID NO: 727 - DNA, 646 bp, Lactococcus garvieae
  ref <308>: DATABASE ACCESSION NUMBER: ATCC 49156
cggtcctatgcctcaaactcgtgaacacatcttgttatcacgtaacgttggcgtaccatacatcgttgttttcttgaacaaaatggatatggttgatgacgaagaattgctagaattagttgaaatggaagttcgtgacctattgtctgaatatgacttcccaggcgacgatgttcctgtaatcgctggttctgctttgaaagctcttgaaggagatccttcatacgaagaaaaaatcatggaattgatggctgcagttgacgaatacgttccaactccagaacgtgatactgacaaaccattcatgatgccagtcgaagacgtattctcaatcactggacgtggtactgttgctacaggccgtgttgaacgtggacaagttcgcgttggtgatgaagtagaaatcgttggtattgctgacgaaactgctaaaacaactgtaacaggtgttgaaatgttccgtaaattgttagactatgctgaagcaggggataacattggtgcattgctacgtggggttgctcgtgaagacatccaacgtggacaagtattggctaaagctggtacaatcacacctcatacaaaattcaaagctgaagtttatgttttgacaaaagaagaaggtggacgtcacactccattcttc

SEQ ID NO: 728 - DNA, 823 bp, Mycoplasma pirum
  ref <308>: DATABASE ACCESSION NUMBER: ATCC 25960D
gagcaattttagttgtttctgcaactgatggtccaatgcctcaaactcgtgaacatatcttattagcacgccaagttggtgttcctaaaatggttgttttcttaaacaaatgtgatgttgcttctgatccagaaatgcaagaattagttgctgaagaagtaaaagacttattaaaatcttatggttttgatggtgacaatactccaattattcgtggttcagcattagaagcattaaatggtaaacctgaatgagaagaaaaaattaaagaattaatgaaggcagtggatgacactattcctgatccagttcgtgatactgaaaagccattcttgttaccaattgaagacgtaatgacaattacaggtcgtggtactgttgttacaggtcgtgtagaacgtggtactctaaaattaaatgatgaagttgaaattgttggtttaggtgaaacatttaaatctgttgtaacaggtattgaaatgttccgtaaagaattagatgaagctcgtgctggtgacaatgctggtattttacttcgtggtgttgaccgtggtcaagtacaacgtggtcaagttcttgctaaaccaggttctattactcctcatactaaatttaaagctgaaatttatgctttgaaaaaagaagaaggtggtcgtcatactgctttcttaaacggttatcgtcctcaattctatttcagaacaactgatgttacaggttctattaaattaaaagatggaactgaaatggttatgcctggtgacaatactgaaatcactgtagaattaatttcaccaattgcttgtaaaaaggaagtaagttt

SEQ ID NO: 729 - DNA, 826 bp, Mycoplasma salivarium
  ref <308>: DATABASE ACCESSION NUMBER: ATCC 23064
ggagcaatcttagttgttgctgcaactgatggtgcgatgcctcaaactcgtgaacacgttttacttgcaaaacaagttggtgttcctaaaatcgttgttttcttaaacaaaatcgatatgttcaagccagaagaaagagccgaaatggttgaaatggttgaaatggacattcgtgacttattaaacaaatacgactttgatggtgacaatactcctattattgctggttcagcattaaaagcattacaaggtgatccagaatatgaaaagaatattctagaacttatggatgcagtagacacatacattgatgaacctactcgtgataaagataaaccattcttaatggctgtagaagacgtatttacaattactggtcgtggaactgttgctactggtagagtagaacgtggtacattacatctaaatgatgaagttgaaatcgttggtctacgtccaacaattaaaactgttgttactggaattgaaatgttccgtaaaaatttaaaagaagctcaagctggagataatgcaggacttttactacgtggaattgatagagatcaagtagaacgtggacaagttttggccaaaccaaaaagtattattcctcacacagaatttgaagctgctgtgtatgttctaaaagctgaagaaggtggacgtcacactccattctttgaacactataaaccacaattttactttcgtacaaccgacgttactggtggaattaaattcaaacctggacgtgaaatggttatgcctggcgaaaatgttgaatttacagttactttaattgctcctattgcagttgaagaaggaa

SEQ ID NO: 730 - DNA, 810 bp, Neisseria polysaccharea
  ref <308>: DATABASE ACCESSION NUMBER: ATCC 43768
tggtatgttccgcagcygayggycctatgcctcaaactcgcgaacacatcctgytggctcgccaagtaggygtaccttacatcatcgtrttcatgaacaaatgcgacatggttgacgatgccgagctgttggaactggttgaaatggaaatccgygacctgytgtcmagctacgacttcccmggcgacgactgcccaatcgtacaaggttctgcactgaaagctttggaaggygaygctggttacgaagagaaaatcttcgaaytggctgctgctttggacagctacatcccaactcctgagcgtgctgtggacaaacckttcytgytgcctatcgaagacgtrttctctatctctggycgyggtacmgtagtaacyggycgtgtagagcgcggtrtcatccacgttggtgacgagatygaaatcgtaggtctgaaagaaacccaaaaaaccacttgtaccggcgttgaaatgttccgcaaactgctggacgaaggtcaagcwggtgacaacgtaggcgtattgytgcgtggtaccaarcgtgaagacgtagagcgtggtcaagtattggcyaaaccaggyaccatyactccscacaccaaattcaaagcagaagtatacgtactgagcaaagaagagggtggtcgycacactccattcttcgcyaactaccgyccmcaattctacttccgtacyactgacgtaacyggtgcagttactttggaagaaggtgtagaaatggtaatgccaggtgagaacgtaaccattacygtagaactgattgcgcctatcgctaggaagaaggtctgcg

SEQ ID NO: 731 - DNA, 813 bp, Salmonella choleraesuis subsp. choleraesuis
  ref <308>: DATABASE ACCESSION NUMBER: ATCC 13076
ctggttgttgctgcgactgacggcccgatgccgcagacccgtgagcacatcctgctgggtcgtcaggtaggcgttccgtacatcatcgtgttcctgaacaaatgcgacatggttgatgacgaagagctgctggaactggttgaaatggaagttcgygaactgctgtctcagtacgacttcccgggcgacgacactccgatcgttcgtggttctgctctgaaagcgctggaaggcgacgcagagtgggaagcgaaaatcatcgaactggctggcttcctggattcttacatcccggaaccagagcgtgcgattgacaagccgttcctgctgccgatcgaagacgtattctccatctccggtcgtggtaccgttgttaccggtcgtgtagaacgcggtatcatcaaagtgggcgaagaagttgaaatcgttggtatcaaagagactcagaagtctacctgtactggcgttgaaatgttccgcaaactgctggacgaaggccgtgccggtgagaacgtaggtgttctgctgcgtggtatcaaacgtgaagaaatcgaacgtggtcaggtactggctaagccgggcaccatcaagccgcacaccaagttcgaatctgaagtgtacattctgtccaaagatgaaggcggccgtcacactccgttcttcaaaggctaccgtccgcagttctacttccgtactactgacgtgactggcaccatcgaactgccggaaggcgtagagatggtaatgccgggcgacaacatcaaaatggttgttaccctgatccacccgatcgcaatggacgacggtctgcgt

SEQ ID NO: 732 - DNA, 812 bp, Salmonella choleraesuis subsp. choleraesuis
  ref <308>: DATABASE ACCESSION NUMBER: ATCC 9184
ctggttgttgctgcgactgacggcccgatgccgcagacccgtgagcacatcctgctgggtcgtcaggtaggcgttccgtacatcatcgtgttcctgaacaaatgcgacatggttgatgacgaagagctgctggaactggttgaaatggaagttcgygaactgctgtctcagtacgacttcccgggcgacgacactccgatcgttcgtggttctgctctgaaagcgctggaaggcgacgcagagtgggaagcgaaaatcatcgaactggctggcttcctggattcttacatcccggaaccagagcgtgcgattgacaagccgttcctgctgccgatcgaagacgtattctccatctccggtcgtggtaccgttgttaccggtcgtgtagaacgcggtatcatcaaagtgggcgaagaagttgaaatcgttggtatcaaagagactcagaagtctacctgtactggcgttgaaatgttccgcaaactgctggacgaaggccgtgccggtgagaacgtaggtgttctgctgcgtggtatcaaacgtgaagaaatcgaacgtggtcaggtactggctaagccgggcaccatcaagccgcacaccaagttcgaatctgaagtgtacattctgtccaaagatgaaggcggccgtcacactccgttcttcaaaggctaccgtccgcagttctacttccgtactactgacgtgactggcaccatcgaactgccggaaggcgtagagatggtaatgccgggcgacaacatcaaaatggttgttaccctgatccacccgatcgcaatggacgacggtctgcg

SEQ ID NO: 733 - DNA, 814 bp, Salmonella choleraesuis subsp. choleraesuis
  ref <308>: DATABASE ACCESSION NUMBER: ATCC 8759
tggttgttgctgcgactgacggyccgatgccgcagacccgtgagcacatcctgctgggtcgtcaggtaggcgttccgtacatcatcgtgttcctgaacaaatgcgacatggttgatgacgaagagctgctggaactggttgaaatggaagttcgygaactgctgtctcagtacgacttcccgggcgacgacactccgatcgttcgtggttctgctctgaaagcgctggaaggcgacgcagagtgggaagcgaaaatcatcgaactggctggcttcctggattcttacattccggaaccagagcgtgcgattgacaagccgttcctgctgccgatcgaagacgtattctccatctctggtcgtggtaccgttgttaccggtcgtgtagaacgcggtatcatcaaagtgggcgaagaagttgaaatcgttggtatcaaagagactcagaagtctacctgtactggcgttgaaatgttccgcaaactgctggacgaaggccgtgcyggtgagaacgtaggtgttctgctgcgtggtatcaaacgtgaagaaatcgaacgtggtcaggtactggctaagccgggcaccatcaagccgcacaccaagttcgaatctgaagtgtacattctgtccaaagatgaaggcggccgtcatactccgttcttcaaaggctaccgtccgcagttctacttccgtactactgacgtgactggcaccatcgaactgccggaaggcgtagagatggtaatgccgggcgacaacatcaaaatggttgttaccctgatccacccgatcgcaatggacgacggtctgcgttt

SEQ ID NO: 734 - DNA, 828 bp, Salmonella choleraesuis subsp. choleraesuis
  ref <308>: DATABASE ACCESSION NUMBER: ATCC 51955
ggcgcgatcctggttgttgctgcgactgacggcccgatgccgcagacccgtgagcacatcctgctgggtcgtcaggtaggcgttccgtacatcatcgtgttcctgaacaaatgcgacatggttgatgacgaagagctgctggaactggttgaaatggaagttcgtgaacttctgtctcagtacgacttcccgggcgacgacactccgatcgttcgtggttctgctctgaaagcgctggaaggcgacgcagagtgggaagcgaaaatcatcgaactggctggcttcctggattcttacattccggaaccagagcgtgcgattgacaagccgttcctgctgccgatcgaagacgtattctccatctccggtcgtggtaccgttgttaccggtcgtgtagaacgcggtatcatcaaagtgggcgaagaagttgaaatcgttggtatcaaagagactcagaagtctacctgtactggcgttgaaatgttccgcaaactgctggacgaaggccgtgccggtgagaacgtaggtgttctgctgcgtggtatcaaacgtgaagaaatcgaacgtggtcaggtactggctaagccgggcaccatcaagccgcacaccaagttcgaatctgaagtgtacattctgtccaaagatgaaggcggccgtcatactccgttcttcaaaggctaccgtccgcagttctacttccgtactactgacgtgactggcaccatcgaactgccggaaggcgtagagatggtaatgccgggcgacaacatcaaaatggttgttaccctgatccacccgatcgcaatggacgacggtctgcgtttcgca

SEQ ID NO: 735 - DNA, 825 bp, Serratia grimesii
  ref <308>: DATABASE ACCESSION NUMBER: ATCC 14460
ggcgctatcctggttgttgctgcgactgatggcccaatgccacagacccgtgagcacatcctgctgggtcgtcaggttggcgttcctttcatcatcgtattcatgaacaaatgcgacatggttgatgatgaagagctgctggaactggtagaaatggaagttcgtgaacttctgtctgcttatgacttccctggtgatgacctgccagttgttcgtggttcagcgctgaaagcactggaaggcgaagctgagtgggaagctaaaatcatcgaactggctggctacctggattcttacatcccagaaccagagcgtgctatcgacaagccgttcctgctgccaatcgaagacgtattctccatctccggycgtggtacygtagttaccggtcgtgtagagcgcggtatcgttaaagttggcgaagaagttgaaatcgttggtatcaaagacaccgttaagtctacctgtactggcgttgaaatgttccgcaaactgctggacgaaggccgtgctggtgagaacgtaggtgttctgctgcgtggtatcaagcgtgaagacatcgaacgtggtcaggtactggctaaaccaggttcaatcaagccacacaccaaattcgactcagaagtttacatcctgagcaaagaagaaggtggtcgtcacactccattcttcaaaggctaccgtccacagttctacttccgtacaactgacgtgaccggtaccatcgaactgccagaaggcgtagagatggtaatgccaggcgataacgtgaacatggttgtaaccctgattcacccaatcgcgatggacgacggtctgcgtttc

SEQ ID NO: 736 - DNA, 798 bp, Clostridium difficile
  ref <308>: DATABASE ACCESSION NUMBER: ATCC 9689
tattagtttgttcagcaacagatggaccaatgccacaaacaagagagcatatactattatcaagacaagttggagtaccatatatagtagtattcttaaacaaatgtgacatggtagatgatgaagagttattagagttagtagagatggaagtaagagatttattaacagaatatgatttcccaggagatgacactccaatagtaagaggttcagcattaatggcattagaagatccaaagagygagtggggagataagatagtagaattattcgagcaaatagatgagtatataccagctccagagagagatacagataaaccattcttaatgccagtagaggacgtattctcaatcacaggaagaggaacagttgcaacaggaagagtggaaagaggagtactaaaagtacaagacgaagtagakttagtaggattaacagaagcaccaagaaaagtagtagtaacaggagtagagatgttcagaaaattattagaccaagcacaagcaggggataatataggagcattattaagaggagtacaaagaaacgagatagaaagaggacaagtactagcaaagactggatcagtaaaggcacacacaaagtttacagcagaagtatatgtacttaaaaaagaagarggtggaagacatacaccattctttgatggatatagaccacaattctatttcagaacaacagacgtaacaggagcttgtaagttaccagaaggaatagagatggtaatgcctggagataacgtaacaatggaagtagacttaataaactcaa

SEQ ID NO: 737 - DNA, 411 bp, Burkholderia pseudomallei
  strain 1026B
gtcaacatgatggagctcatcaacaacatcgcgaaggagcacggcggttactccgtgttcgcgggcgtgggcgagcgtacccgtgaagggaacgacttctaccacgaaatgaaggactcgaacgttctcgacaaggtcgcgctggtgtacggccagatgaacgagccgccgggcaaccgtctgcgcgtggcgctgacgggcctcacgatggccgagcacttccgtgacgaaggcctcgacgtgctgttcttcgtcgacaacatctaccgtttcacgctggccggtaccgaagtgtcggcgctgctcggccgtatgccgtcggcagtgggctatcagccgacgctggctgaagaaatgggcaagctgcaagagcgcatcacgtcgacgaagaagggctcgatcacgtcggtt

SEQ ID NO: 738 - DNA, 394 bp, Clostridium bifermentans
  ref <308>: DATABASE ACCESSION NUMBER: ATCC 638
tacaagagcttattaacaatatagctactcaacacggtggtatatcagtattcgcaggtgttggagagagaacaagagaaggtaacgacttattccatgagatgagcgatacaggagttataaataaaacagctctagtattcggacaaatgaatgagccacctggagcaagaatgagagttgctttaactggtcttacaatggctgaatacttcagagatcaacaagggcaagacgttttattattcgtagataatatattccgtttcactcaagcaggatctgaggtttctgcacttcttggacgtactccatcagcagttggataccaaccaacattagcaacagagatgggtagattacaagagagaataacatctacaaataaagggtc

SEQ ID NO: 739 - DNA, 394 bp, Clostridium beijerincki
  ref <308>: DATABASE ACCESSION NUMBER: ATCC 8260
ttaataaacaacatagctaaacaacatggtggtttatcagtatttactggagttggtgaaagatcaagagaaggtaatgacttatatcatgaaatgagagagtcaggagttattgataagacagcattagtatttggacaaatgaatgagccaccgggtgccagaatgagagttgcattaacaggtcttactatggcagagtattttagagataaaggtcaagatgtgttactattcatagataacatattcagatatactcaagcaggttcagaggtttcagcattacttggaagaacaccttcagcggttggatatcagccaacacttgcaactgaaatgggtgcacttcaggaaagaattacatcaacagttaatggttctattacgtcag

SEQ ID NO: 740 - DNA, 393 bp, Clostridium difficile
  ref <308>: DATABASE ACCESSION NUMBER: ATCC 9689
ttataaacaatattgctaagcaacatggtggtatttctgtattttcaggagtaggagaaagaacaagagaaggtaacgacctttatggcgaaatgagtgagtctggagttataaataaaacagctctagtatttggtcaaatgaatgaaccacctggagcgagaatgagagttgctttaactggacttacaatggcagaacattttagagatgagcaaggacaagacgttttacttttcgttgataatatattccgtttcacacaagctggttcagaagtttcagcacttctaggacgtatgccatcagctgttggttatcagccaacattagctactgaaatgggtgcacttcaagagagaataacatcaactaagaaaggttcaataacat

SEQ ID NO: 741 - DNA, 398 bp, Clostridium ramosum
  ref <308>: DATABASE ACCESSION NUMBER: ATCC 25582
ttgattcaagaattcattaataacattgctacagaacatggtggtttatcagtttttgctggagttggtgaacgtagccgtgaaggtaatgatttatattatgaaatgaaggaaagtggtgttttatctaaaacaacactagtatttggacagatgaatgaacccccaggagctcgtttaagagttgctttaacgggtcttactatggcagaagaattccgtgatgaacaaggtcaggatgtcttattattcatcgataatattttccgttttactcaagctggatctgaagtatctgccttacttggacgggtaccatcacaagctgggtatcagccaactttagcaaccgaaatgggtgctttacaagaacggattacatcaactaaaaaaggatc

SEQ ID NO: 742 - DNA, 380 bp, Clostridium septicum
  ref <308>: DATABASE ACCESSION NUMBER: ATCC 12964
tagctaaggaacacggtggactttcagtattcacaggtgttggagaaagatcaagagaaggtaatgatttatattacgaaatgaaagaatcaggagttatagacaagacagctctagtgtttggacaaatgaatgaatctccaggagctagaatgagagtatctttaacaggattaactatggctgaatatttcagagatcaaggtcaagatgtgcttttattcatagataacatatttagatttactcaagctggatcagaagtatcggctttacttggaagaataccatcagcagttggttatcaaccaacactagcaactgaaatgggtgcacttcaagaaagaattacttcaactaaaaatggatcaataacttca

SEQ ID NO: 743 - DNA, 389 bp, Clostridium tertium
  ref <308>: DATABASE ACCESSION NUMBER: ATCC 14573
ttaataaataatatagcaaaagagcatggtggtctttctgtatttacaggagttggagaaaggtcaagagaaggtaacgacttatattatgaaatgaaagagtcaggggttatagataagacagctttagtatttggacaaatgaatgaatcaccaggagcaagaatgagagtttcattaactggattaactatggctgaatattttagagatcaaggtcaagacgttcttttatttatagataatatatttagatttactcaagcgggatcagaagtttctgcgttattaggaagaattccttcagcagttggatatcaaccaactcttgcaactgaaatgggagcacttcaagaaagaataacatcaacaaagaatggatcaatcac

SEQ ID NO: 744 - DNA, 843 bp, Comamonas acidovorans
  ref <308>: DATABASE ACCESSION NUMBER: ATCC 15668
ttcccccgcacgcatgcccaaggtgttcgatgccctgaagctcgacggctcggccctgacgctggaagtgcagcaactgctgggtgacggcgttgtgcgtaccatcgccctgggttcgtccgacggtctgcgtcgcggcctgatggtgtccaacaccggcaaccccatcaccgtgcccgtgggcaaggcgacgctgggtcgcatcatggacgtgctgggcaatcccatcgacgaacgtggtcccgtggatcaggcgctgacggctcccatccaccgcaaggcaccggcttatgacgagctgtcgccttcgcaggaactgctggaaaccggcatcaaggtgatcgacctgatctcgcccttcgccaagggcggcaaggtgggtctgttcggtggcgccggtgtgggcaagaccgtgaacatgatggaactcatcaacaacatcgccaagggccacggtggtctgtcggtgttcgccggtgtgggtgaacgtacccgcgaaggcaatgacttctatcacgaaatgtcggacgccggcgtggtcaaccaggagtcgctgaacgactccaaggtggccatggtctacggccagatgaacgaacccccgggcaaccgtctgcgcgtggcgctgaccggcctgaccatggccgaagccttccgtgacgaaggcaaggacgtgctgttcttcgtggacaacatctaccgctacacgctggccggtaccgaagtgtccgctctgctgggtcgcatgccttccgccgtgggctaccagcccacgctggccgaggaaatgggccgcctgcaagagcgcatcacctcgaccaaggtcggttcgatcacttccac

SEQ ID NO: 745 - DNA, 819 bp, Klebsiella pneumoniae subsp. rhinoscleromatis
  ref <308>: DATABASE ACCESSION NUMBER: ATCC 13884
gccgtaccacgcgtgtacgaagcccttgaggtacagaatggtaatgaagttctggtgctggaagttcagcagcagctgggcggcggtatcgtacgtaccatcgccatgggttcttctgatggtctgcgccgcggtctggatgtaaaagacctcgagcacccgatcgaagtcccggtaggtaaagcaacgctgggtcgtatcatgaacgtactgggtcaaccggttgacatgaaaggcgacatcggcgaagaagagcgttgggctatccaccgcgcggcaccgtcctatgaagagctgtccagctctcaggaactgctggaaaccggcatcaaagttatcgacctgatgtgtccgttcgccaagggcggtaaagttggtctgttcggcggtgcgggtgtaggtaaaactgtaaacatgatggagctgatccgtaacatcgcgatcgagcactccggttactctgtgtttgcgggcgtaggtgagcgtactcgtgagggtaacgacttctaccacgaaatgaccgactccaacgttatcgataaagtatccctggtgtacggccagatgaacgagccgccgggaaaccgtctgcgcgttgcgctgaccggcctgaccatggctgagaaattccgtgacgaaggtcgtgacgtactgctgttcgtcgataacatctatcgttacaccctggccggtactgaagtatccgcgctgctgggtcgtatgccttcagcggtaggttatcagccgaccctggcggaagagatgggcgttctgcaggaacgtatcacctccaccaaaaccggttctatcacctccgta

SEQ ID NO: 746 - DNA, 824 bp, Neisseria canis
  ref <308>: DATABASE ACCESSION NUMBER: ATCC 14687
gcgattctattccgcgcgtatatgatgctcttaaactagtggatagagaactgacgcttgaagtacaacaacagttgggtgatggtgtcgttcgtactattgcgatgggtagttccgacggcctcaaacgaggtttggcggtagttaacaccggtgctccaattacagtgcctgtgggcaaagcaacattaggccgtattatggacgtattaggtaatccggttgatgaagctggtccgattggctccgagcaaacccgagcaatccaccaacctgctcctaagttcgacgagctttctagcgccacagagattttggaaacaggtattaaagtaattgatttgctttgcccgtttgccaaaggcggtaaagtaggtttgtttggtggtgcgggagtgggcaaaaccgtaaatatgatggagttgattaacaacatcgcgaaagcacacagcggtttgtctgtatttgccggtgtgggtgaacggacgcgtgaaggtaatgacttttatcatgagatgaaagattccaatgtattagataaagtagccatggtttacggtcagatgaacgagcctcccggtaaccgtttgcgcgttgcgctaactggcttgtctatggccgaattcttccgtgacgagaaagatgaaaacggtaaaggccgtgatgtattgttctttgtagacaatatttaccgctataccctagccggtacagaagtatctgcattgcttggccgtatgccttcggcagtaggttatcagccgacgttggcagaggaaatgggccgcttgcaagagcgtattacytcamcccaaacaggctct

SEQ ID NO: 747 - DNA, 831 bp, Neisseria cinerea
  ref <308>: DATABASE ACCESSION NUMBER: ATCC 14685
cgcgacgctatcccgcatgtttacgatgccctgaaattggacgagaacggtctgactctggaggttcaacagcttctgggcgacggcgttgtccgtactattgcaatgggtagttcagacggccttaaacgcggtatgtctgtaagcaatactggtgcgccaatcactgtgccggtaggtaaaggtacattgggtcgtattgtcgacgtattgggtacgcctgttgatgaagcaggtccgatcgataccgacaaaagccgtgccattcaccaaactgctccgaaattcgacgagttgtcttcagctaccgaattgttggaaaccggtattaaagtgatcgacttgctgtgtccgtttgctaaaggcggtaaagtaggtctgttcggtggtgccggtgtgggcaaaaccgtgaacatgatggaattgatcaacaacatcgccaaagcgcacagcggtctgtccgtgttcgcaggtgtgggtgagcgtacccgtgaaggtaacgacttctaccacgagatgaaagattccaacgtattggataaagtagccatggtgtatggccaaatgaacgaacctccgggcaaccgtctgcgcgttgctttgaccggtttgactatggccgaatacttccgtgacgaaaaagacgaaaacggtaaaggccgcgacgtattgttcttcgttgacaacatctaccgttacactttggccggtactgaagtatctgcactgttgggccgtatgccttctgcagtgggttaccaaccgacattggctgaagaaatgggtcgtttgcaagagcgtattacctctacccaaaccggttccattact

SEQ ID NO: 748 - DNA, 862 bp, Neisseria cuniculi
  ref <308>: DATABASE ACCESSION NUMBER: ATCC 14688
ccgtggccaagtaccacaaatttatgacgcactgagtgttgatggcaccgaaacaaccttggaagttcaacagcagttgggtgatggcgtggtgcgtaccattgcgatgggttcaaccgaaggcttgaagcgtggtttgactgtatctaactctggtgcaccgatttctgtgccagtgggtcaagcgactttgggtcgtattatggatgtgttgggtcgtccaatcgacgaggcaggtcctgtaaatgctcaagaaaaatggtcaattcaccgtgaagcaccaagctatgatgagcaatcaaactcaactgagctgctagaaacaggcatcaaagtaattgatttgctttgcccatttgctaaaggtggtaaagttggcttgttcggtggtgcaggtgtgggtaaaaccgtgaatatgatggagctgattaataatatcgctctgaagcattcaggtctttctgtttttgcaggtgttggtgagcgtactcgtgagggtaacgatttttatcacgaaatgcaagaagcaggcgttgttaataccgaagacttcaccaagtcaaaagtagcgatggtttatggtcagatgaatgagccaccaggaaaccgtttgcgtgttgcattgacaggcttgacgatggcagaatatttccgtgacgaaaaagatgaagcaacaggcaaagggcgtgatgttctattgttcgttgataacatctatcgttacacactggctggtacggaagtgtcagcacttctaggtcgtatgccatcagcagtaggttatcaaccgactctggctgaagaaatgggtgcgttgcaagagcgtattacctcaacgcaatcgggttcgatcacttcgggg

SEQ ID NO: 749 - DNA, 844 bp, Neisseria elongata subsp. elongata
  ref <308>: DATABASE ACCESSION NUMBER: ATCC 25295
ggaactcccacgtgacgctatcccgcatgtttttgatgcattaaaattagttgaaaatgacctaaccttagaagttcaacaacttttgggggatggtgtagtgcgtaccattgcgatgggtagttcagatggattaaagcgtggtatggctgtgaataataccggagctccgattactgttcctgttggccgtgaaactttgggtcgtatcatggatgtattgggtaatccggttgatgaggcaggtccggtaaatgcatccaatacacgtgcgatccatcaagaggctcctaagtttgatgagctttcttcaacaacggaattattagaaactggcattaaggttatcgacttgttatgtccgtttgccaaaggtggtaaagtaggtctgtttggtggtgcgggtgtaggtaaaaccgtaaatatgatggagttaattaacaacattgccaaggcacatagcggtttgtctgtgtttgcaggcgtgggtgaacgtactcgtgaaggtaatgacttctatcacgagatgaaagattccaacgtattggacaaagtggcaatggtttacggtcagatgaacgaacctccaggcaaccgtctgcgcgttgctttgaccggtttgactatggccgaatacttccgtgacgaaaaagacgaaaacggtaaaggtcgcgacgtattgttcttcgtggacaacatttaccgttacactttggccggtacggaagtatccgcattgctgggtcgtatgccttcagcagtaggttaccaaccgacattggctgaagaaatgggtcgtttgcaagagcgtattacctctacccagacaggctctattacttcc

SEQ ID NO: 750 - DNA, 834 bp, Neisseria flavescens
  ref <308>: DATABASE ACCESSION NUMBER: ATCC 13120
cgcgacgctattccgcatgtttacgatgccctgaaattggacgagaacggtctgactctggaagttcaacagcttctgggtgacggcgttgtccgtactattgcaatgggtagttcagacggcctgaaacgcggcatgtctgtaagcaataccggtgcgccaatcactgtgccggtaggtaaaggtacattgggccgtattgtcgacgtattgggtacgcctgttgatgaagcaggtccgatcgataccgacaagagccgtgccattcaccaaactgctccgaaattcgatgagttgtcttcaactaccgaattgttggaaaccggtattaaagtgatcgacttgctgtgtccgtttgctaagggcggtaaagtaggtctgttcggtggtgccggtgtgggcaaaaccgtgaacatgatggaattgatcaacaacatcgccaaagcgcacagcggcctgtccgtgttcgcaggtgtgggtgaacgtacccgtgaaggtaacgacttctaccacgagatgaaagattccaacgtattggataaagtagccatggtgtatggtcaaatgaacgaacctccaggcaaccgtctgcgcgttgctttgaccggtttgactatggccgaatacttccgtgacgaaaaagatgaaaacggtaaaggtcgcgacgtattgttcttcgttgacaacatctaccgttacactctggccggtaccgaagtatccgcactgttgggtcgtatgccttctgcagtgggttaccaaccgacattggctgaagaaatgggtcgtttgcaggagcgtattacttctacgcaaaccggttccattacttcc

SEQ ID NO: 751 - DNA, 834 bp, Neisseria gonorrhoeae
  ref <308>: DATABASE ACCESSION NUMBER: ATCC 31426
cgcgacatgattccgcgcgtttacgacgctttgaaattagacgaaaacggtctgactttggaagtccaacagcttttgggtgatggcgtagtccgtaccatcgctatgggcagctcggacggtttgaaacgcggcatgactgtgagcaatactggttcgcccattactgtgccggtaggtaaaggtacgttgggacgcattgtcgatgtattgggaactcctgttgacgaggcaggtccaattgataccgacaagagtcgtgccatccaccaagccgctcctaagtttgacgaactgtcttccacaaccgaattgctcgaaacgggcattaaagtgattgacttgctgtgtccgtttgccaaaggcggtaaagtaggtctgttcggcggtgccggtgtgggtaaaaccgtgaacatgatggaattgatcaacaacatcgccaaagcgcacagcggcttgtccgtgttctcaggcgtgggtgagcgtacccgcgaaggtaacgacttctaccacgagatgaaagattccaacgtattggataaagtagccatggtgtatggccaaatgaacgaacctccaggcaaccgtctgcgcgttgctttgaccggtttgactatggctgaatacttccgtgacgaaaaagacgaaaacggtaaaggtcgtgacgtattgttcttcgttgacaacatctaccgttacactctggccggtaccgaagtatccgcactgttgggccgtatgccttctgcagtgggttaccaaccgacattggctgaagaaatgggtcgtttgcaagagcgtattacctctacccaaaccggttccattacttcc

SEQ ID NO: 752 - DNA, 825 bp, Neisseria gonorrhoeae
  ref <308>: DATABASE ACCESSION NUMBER: ATCC 27628
acatgattccgcgcgtttacgacgctttgaaattagacgaaaacggtctgactttggaagtccaacagcttttgggtgatggcgtagtccgtaccatcgctatgggcagctcggacggtttgaaacgcggcatgactgtgagcaatactggttcgcccattactgtgccggtaggtaaaggtacgttgggacgcattgtcgatgtattgggaacgcctgttgacgaggcaggtccaattgataccgacaagagtcgtgccatccaccaagccgctcctaagtttgacgaactgtcttccacaaccgaattgctcgaaacgggcattaaagtgattgacttgctgtgtccgtttgccaaaggcggtaaagtaggtctgttcggcggtgccggtgtgggtaaaaccgtgaacatgatggaattgatcaacaacatcgccaaagcgcacagcggcttgtccgtgttctcaggcgtaggtgagcgtacccgcgaaggtaacgacttctaccacgagatgaaagattccaacgtattggataaagtagccatggtgtatggccaaatgaacgaacctccaggcaaccgtctgcgcgttgctttgaccggtttgactatggctgaatacttccgtgacgaaaaagacgaaaacggtaaaggtcgtgacgtattgttcttcgttgacaacatctaccgttacactctggccggtaccgaagtatccgcactgttgggccgtatgccttctgcagtgggttaccaaccgacattggctgaagaaatgggtcgtttgcaagagcgtattacctctacccaaaccggttccatta

SEQ ID NO: 753 - DNA, 831 bp, Neisseria lactamica
  ref <308>: DATABASE ACCESSION NUMBER: ATCC 23970
gatgcgattccgcatgtttacgatgccctgaaattggacgagaacggtctgaccctggaagtccaacagcttttgggtgacggcgttgtccgtactattgcaatgggtagttcagacggcctgaaacgcggcatgtctgtcagcaataccggtgcgccaatcactgtgccggtaggtaaaggtacgttgggccgtattgtcgacgtattgggtacacctgttgacgaagcaggtccgatcgataccgacaagagccgcgccatccaccaaaccgccccgaaattcgacgagttgtcttcaactaccgaattgttggaaaccggcattaaagtgatcgatttgctgtgtccgtttgctaagggcggtaaagtaggtctgttcggtggtgccggtgtgggcaaaaccgtgaacatgatggaattgatcaacaacatcgccaaagcgcacagcggtctgtccgtgtttgcaggcgtgggcgagcgtacccgcgaaggtaacgacttctaccacgagatgaaagattccaacgtattggataaagtagccatggtgtatggtcagatgaacgaacctccgggcaaccgtctgcgcgttgctttgaccggtttgacgatggccgaatacttccgcgacgaaaaagacgaaaacggcaaaggccgcgacgtattgttcttcgtggacaacatctaccgttacaccctggccggtaccgaagtatccgcactgttgggccgtatgccttccgcagtgggttaccaaccgacattggctgaagaaatgggtcgtttgcaagagcgtattacctctacccaaaccggttccattacttcc

SEQ ID NO: 754 - DNA, 836 bp, Neisseria meningitidis
  strain 2241C
ccacgcgacatgattccgcgcgtttacgacgctttgaaattagacgaaaacggtctgactttggaagtccaacagcttttgggcgacggcgtagtccgtaccattgcgatgggcagctcggacggtttgaaacgcggcatgactgtgagcaataccggtgcgcccattactgtgccggtaggtaaaggtacgttgggacgcattgtcgatgtattgggaacgcctgttgacgaggcaggtccaatcgataccgacaagagccgtgccatccaccaagccgctcctaagtttgacgaactgtcttccacaaccgaattgctcgaaacgggcattaaagtgattgacttgctgtgtccgtttgccaaaggcggtaaagtaggtctgttcggcggtgccggtgtgggtaaaaccgtgaacatgatggaattgatcaacaacatcgccaaagcgcacagcggcttgtccgtgttcgcaggcgtgggtgagcgtacccgcgaaggtaacgacttctaccacgagatgaaagattccaacgtattggataaagtggcaatggtttacggtcagatgaacgaacctccgggcaaccgtttgcgcgtcgcattgaccggtttgaccatggcggaatacttccgtgacgaaaaagacgaaaacggcaaaggccgcgacgtattgttcttcgtggacaacatctaccgttacactctagctggtaccgaagtatccgcattgttgggccgtatgccgtctgcagtgggctaccaaccgacattggcagaagaaatgggtcgtttgcaggagcgtattacctctacccaaaccggttctattacttc

SEQ ID NO: 755 - DNA, 837 bp, Neisseria mucosa
  ref <308>: DATABASE ACCESSION NUMBER: ATCC 19696
ccgcgtgatgccattccgcgtgtttacgacgccctgaaattggatgcaaacggcctgactttggaagtgcaacagcttctgggtgacggcgtagttcgtactattgcaatgggtagttcggatggtttgaaacgcggcatgactgtaagcaatacaggtgcgccgattacagtaccggtaggtaaaggtactttgggacgtattgtcgatgtattgggtacgcctgttgacgaagcaggtccgattgataccgacaaacaccgtgccatccatcagacagctccgaaatttgatgaactgtctgcgactactgagctgctggaaaccggcattaaagtgattgacttgctgtgtccgtttgccaaaggcggtaaagtaggtctgttcggtggtgccggtgtaggcaaaaccgtcaacatgatggaattaattaacaacatcgccaaagcacatagcggtttgtccgtgtttgcaggtgtgggtgagcgtacccgtgaaggtaatgacttctaccacgagatgaaagattccaacgtattggacaaagtggcgatggtttacggtcagatgaacgaacctccgggtaaccgtctgcgtgtagccttgaccggtttgacgatggccgaatacttccgtgatgaaaaagacgaaagcggcaaaggccgtgacgtattgttcttcgtggacaatatctaccgttacaccctggccggtaccgaagtatccgcattgttgggtcgtatgccttcagcagtaggttaccaaccgacattggctgaagaaatgggtcgtttgcaagagcgtattacctctacccaaacaggctccattacctcc

SEQ ID NO: 756 - DNA, 834 bp, Neisseria subflava
  ref <308>: DATABASE ACCESSION NUMBER: ATCC 14221
cgcgacgctatcccgcatgtttacgatgccctgaaattggacgagaacggtctgactctggaagttcaacagcttctgggtgacggcgttgtccgtactattgcaatgggtagttcagacggcctgaaacgcggcatgtctgtaagcaatactggtgcgccaatcactgtgccggtaggtaaaggtacattgggtcgtattgtcgacgtattgggtacgcctgttgatgaagcaggtccgatcgataccgacaagagccgtgccattcaccaaactgctccgaaattcgacgagttgtcttcaactaccgaattgctggaaaccggtattaaagtgatcgacttgctgtgtccgtttgctaagggcggtaaagtaggtctgttcggtggtgccggtgtgggcaaaaccgtgaacatgatggaattgatcaacaacatcgccaaagcgcacagcggtctgtccgtgttcgcaggtgtgggtgaacgtacccgtgaaggtaacgacttctaccacgagatgaaagattccaacgtattggataaagtagccatggtgtatggccaaatgaacgaacctccgggcaaccgtctgcgcgttgctttgaccggtttgactatggccgaatacttccgtgacgaaaaagacgaaaacggtaaaggtcgcgacgtattgttcttcgttgacaacatctaccgttacactctggccggtaccgaagtatctgcactgttgggccgtatgccttctgcagtgggttaccaaccgacattggctgaagaaatgggtcgtttgcaagagcgtattacctctacccaaactggttccattacttcc

SEQ ID NO: 757 - DNA, 833 bp, Neisseria weaveri
  ref <308>: DATABASE ACCESSION NUMBER: ATCC 51223
cccgtgatgctattcccatgtatacgatgccctgaaattggtagataacgatctgaccctggaagtgcaacaacttttaggtgatggtgtggttcgtaccattgcaatgggtagttcagacggcctaaaacgtggtatggctgttaacaataccggcgctccgattactgttccggtggggaaagccaccttgggacgtattatggatgtgttgggtaatccggttgatgaagcaggtcctgttgtatcagaagaaactcgcgctattcatcaagctgcccctaaatttgacgaactgtcttcagcaactgagttgttggaaacaggcattaaagtaattgacttgctgtgcccgtttgccaaaggtggtaaagtaggtttgtttggtggtgccggcgtgggtaaaaccgtaaatatgatggagttgatcaacaacatcgcgaaggcacatagtggtttgtctgtattcgccggtgtaggtgagcgtacccgtgaaggtaacgacttctaccatgaaatgaaagactctaacgtattggataaagtagccatggtttatggccagatgaatgaacctccgggtaaccgtttgcgcgttgctttgactggtttgactatggccgaatatttccgtgacgagaaagatgaaaacggcaaaggtcgtgacgtcttgttctttgtggataatatctatcgctatactctggccggtactgaagtgtctgcactgttaggtcgtatgccgtctgcagtaggttatcagcctacattggcagaagaaatgggtcgcttgcaggagcgtattacttctactcaaacaggttcgattactt

SEQ ID NO: 758 - DNA, 833 bp, Neisseria animalis
  ref <308>: DATABASE ACCESSION NUMBER: ATCC 19573
cgcgatgccattcctcacgtttacgatgccctgaaattggacgacaccggtctgactttggaagtacaacaacttctgggcgacggtgtggtacgtaccattgcaatgggtagttcagacggcctgaaacggggtttgtctgtgagcaataccggttctccgattgccgttcctgtcggtaaagcgactttgggtcgtattatggacgtattgggcaatccggttgatgaagccggtccggttgctaccgaagagaaacgtgctattcaccaagccgcaccgaagtttgatgaattgtcatcagctaccgagttgttggaaaccggtattaaagtaatcgacttgctgtgtccgtttgcaaaaggcggtaaagtaggtctgttcggcggtgccggtgtgggcaaaaccgtaaacatgatggaattgatcaacaacatcgccaaagcacacagcggtctgtctgtgtttgccggtgtaggtgaacgtacccgcgaaggtaacgacttctaccacgagatgaaagattccaacgtgttggataaagtagccatggtgtacggtcagatgaatgagccgccgggcaaccgcttgcgcgtggctttgaccggcctgactatggccgaatacttcgtgacgaaaaagacgaaaacggcaaaggtcgtgacgtattgttcttcgtggacaacatttaccgctacacactggccggtaccgaagtatcagcattgttgggccgtatgccgtctgcagtaggttatcagccgacattggcagaggaaatgggtcgcttgcaagagcgtattacctctacccaaaccggttcgattacctct

SEQ ID NO: 759 - DNA, 819 bp, Proteus penneri
  ref <308>: DATABASE ACCESSION NUMBER: ATCC 33519
agcgtccctaaagtatacgacgctcttgaggttatgaatggtaaagaaaaactggtgctggaagttcagcaacagttaggcggtggtatcgttcgttgtatcgcaatgggtacatcagacggtttaagccgtggcttaaaagttgaagatttaggccacccaattgaagtaccagtaggtaaagcaacactgggacgtatcatgaacgttctgggtacacctattgatatgaaaggtgatattgcaactgaagaacgttggtctattcaccgtgaagcaccaacctacgaagagttatcaaactcacaagaactgcttgaaaccggtatcaaagtaatggacttaatctgtccgtttgctaaaggtggtaaagtaggtctgttcggtggtgcgggtgtgggtaaaacagttaacatgatggaattgatccgtaatatcgcgatcgagcactcaggttactctgtatttgctggtgttggtgagcgtactcgtgagggtaacgacttctatcatgaaatgacagattctaacgttcttgacaaagtatcgttagtttatggtcagatgaatgagccaccaggaaaccgtctgcgtgtagcactgactggtctgactatggctgaaaaattccgtgatgaaggccgtgacgtactgttattcgtcgataacatttatcgttacaccttagccggtacagaagtatcagcactgttaggtcgtatgccatcagcggtaggttaccagccaacattggctgaagagatgggtgttctgcaagaacgtatcacttcaaccaaaacaggttcaatcacctctgta

SEQ ID NO: 760 - DNA, 819 bp, Salmonella choleraesuis subsp. choleraesuis
  ref <308>: DATABASE ACCESSION NUMBER: ATCC 13076
gccgtaccacgcgtgtacgatgcccttgaggtgcagaatggtaatgagaagctggtgctggaagttcagcagcagcttggcggcggtatcgtgcgtaccatcgcgatggggtcttctgacggtctgcgtcgcggtctggatgtaaaagatctcgaacacccgatcgaagtcccggtaggtaaagccacgctgggtcgtatcatgaacgtcctgggcgaaccggtcgacatgaaaggcgagatcggcgaagaagagcgttgggcgattcaccgcgcagcaccttcctacgaagagttgtcaaactctcaggaactgctggaaaccggtatcaaagttatcgacctgatgtgtccgttcgcgaagggcggtaaagtcggtctgttcggtggtgcgggtgtaggtaaaaccgtaaacatgatggagcttattcgtaacatcgcgatcgagcactccggttactcagtgtttgcgggcgtaggggaacgtactcgtgagggtaacgacttctaccacgaaatgaccgactccaacgttatcgataaagtatccctggtgtatggccagatgaacgagccgccgggaaaccgtctgcgcgttgcactgaccggcctgaccatggcggagaaattccgtgacgaaggtcgtgacgtactgctgttcgtcgataacatctatcgttacaccctggccggtacggaagtatccgcactgctgggccgtatgccttccgcagtaggttaccagccgactctggcggaagagatgggcgttctgcaggaacgtatcacctccaccaaaaccggttctatcacctccgta

SEQ ID NO: 761 - DNA, 812 bp, Yersinia pestis
  strain KIM D27
accaaaagtgtacaacgcccttgaggtagaaggtacaactgaaaagttagtgctggaagttcagcaacagttgggcggtggtgttgttcgttgtatcgcaatgggctcttccgatggtctgagccgtgggttgaaagtaaccaacctagaacacccgatcgaagtaccggttggtaaagcgacccttggccgtatcatgaacgtattgggtgaaccaatcgacatgaaaggtcctatcggtgaagaagagcgttgggcaatccatcgcgaagcgccttcttatgaagagcttgctagctcacaagatctgttagaaaccggtatcaaggttatggacctgatttgtccgtttgctaagggcggtaaagtcggtctgttcggtggtgcgggtgtaggtaaaacagtaaacatgatggagctgatccgtaacatcgcgatcgagcactctgggtattctgtatttgccggtgtaggtgagcgtacccgtgagggtaatgacttctaccatgaaatgactgactccaacgttttggacaaagtatccttggtttacggccagatgaatgagccaccaggtaaccgtctacgcgttgcactgaccggcctgaccatggcggagaaattccgtgatgaaggtcgtgacgtactgctgtttatcgataatatctatcgttataccctagctggtacggaagtatccgcattgctgggtcgtatgccatcagcggtaggttatcagccaacactggctgaagagatgggtgtgttgcaggaacgtattacttccactaagacgggttcaatcacctctg

SEQ ID NO: 762 - DNA, 408 bp, Burkholderia mallei
  strain GB8
cgacgtgatcgagcccttcttcgtcgacgtgatgcgctcttgcagcttgcccatttcttcagccagcgtcggctgatagcccactgccgacggcatacggccgagcagcgccgacacttcggtaccggccagcgtgaaacggtagatgttgtcgacgaagaacagcacgtcgaggccttcgtcacggaagtgctcggccatcgtgaggcccgtcagcgccacgcgcagacggttgcccggcggctcgttcatctggccgtacaccagcgcgaccttgtcgagaacgttcgagtccttcatttcgtggtagaagtcgttcccttcacgggtacgctcgcccacgcccgcgaacacggagtaaccgccgtgctccttcgcgatgttgttgatgagctccatcatgttgac

SEQ ID NO: 763 - DNA, 400 bp, Clostridium sordellii
  ref <308>: DATABASE ACCESSION NUMBER: ATCC 9714
gaacttataaacaacatagctactcaacatggtggtatatcagtattcgcaggtgttggagagagaacaagagaaggtaacgacctttacggagaaatgagtgagtctggagttataaacaagacagctctagtattcggacaaatgaatgagccacctggagcaagaatgagagttgctttaactggtcttacaatggctgaatatttcagagatcaagaaggacaagacgttttattattcgtagataatatattccgtttcactcaagcaggatctgaggtttctgcacttcttggacgtactccatcagcagttggataccaaccaacattagctacagagatgggtagattacaagagagaataacatctacaaataaagggtctataacatcag

SEQ ID NO: 764 - DNA, 405 bp, Clostridium novyi
  ref <308>: DATABASE ACCESSION NUMBER: ATCC 19402
ttaattcaagaattaatcaacaatatagcgaaggaacacggtggattatctgtatttacaggagttggagaaagaacaagagaaggtaatgacctttactatgaaatgaaagaatctggtgttataaataaaacagcactagtatttggtcaaatgaatgagccacctggagcaagaatgagagttgctcttacaggacttactatggcagaatatttcagggatcaaggacaaaacgtacttttattcatagacaacatatttagattcactcaagcaggttcagaggtgtcagctttacttggaagaatacctagtgccgttggataccaaccaacactagcaacagaaatgggtgcgcttcaagaaagaataacatctacaaagcatggttctataacatca

SEQ ID NO: 765 - DNA, 393 bp, Clostridium botulinum
  strain 20:3.1
aattaataaataacatagctaaagaacatggtggattatcagtgtttactggagttggagaaagatctagagaaggtaatgatctttatcatgaaatgagagaatcaggcgttatagataaaaccgcattagtatttggtcaaatgaatgagccacctggtgctagaatgagagttgcattaacagggttaactatggctgaatattttagagataaaggtcaagatgtattactatttatagataatatatttagatttactcaagctggatcagaagtttcagcattacttggaagaataccatcagcagttggttaccaaccaactttagcaactgaaatgggtgcacttcaagagagaattacatcaactaagaatggttctataacat

SEQ ID NO: 766 - DNA, 399 bp, Clostridium histolyticum
  ref <308>: DATABASE ACCESSION NUMBER: ATCC 19401
aggaacttataaataatattgcaaaacaatatggaggtctatctgtatttacaggtgttggtgaaagaacaagagaaggtaatgacctatataatgaaatgaaagattctggggttatagagaaaactgcactagtatttggacagatgaatgaaccaccaggagcgagaatgagagtagcattgacaggacttactatggcagaatattttagagatcaagggcaagatgtacttttatttatagataatatatttagatttacgcaggctggttctgaagtttctgcattgttaggaagaattccaagtgcagttggatatcaaccaacccttgcaactgaaatgggtgcattacaagaaagaataacatccacaaaaaatggatcaattacttcag

SEQ ID NO: 767 - DNA, 390 bp, Peptostreptococcus prevotii
  ref <308>: DATABASE ACCESSION NUMBER: ATCC 9321
catgatggaactgatccgtaacatcgccatcgagcacagcggttattccgtgttcgccggtgtgggtgagcgtactcgtgagggtaacgacttctaccacgagatgaaggactccaacgttctggacaaagtggcactggtctacggtcagatgaacgagccgccgggtaaccgtctgcgcgtagcactgactggcctgaccatggccgagaagttccgtgacgaaggtaacgacgttctgttgttcgtcgacaacatctaccgttacaccctggccggtactgaagtatccgcactgctgggccgtatgccttcggcagtaggttaccagccgaccctggctgaagagatgggcgttctgcaagaacgtatcacttcgaccaaggaagg

SEQ ID NO: 768 - DNA, 953 bp, Absidia corymbifera
  ref <308>: DATABASE ACCESSION NUMBER: ATCC 46775
aggtcttgttcgtggcaaaaggtcattgacactggtgctcctatcaccattcctgttggtaacgaagtccttggtcgtatcattaacgtcattggtgagcccattgatgagcgtggtccyatcaagtccaaggccactcgtgctatccacgctgatgctcccgagttcgttgatcaatcccccactcccgagattctcgagactggtatcaaggttgtcgatttgcttgctccctatgctcgtggtggtaagattggtcttttcggtggtgccggtgtcggcaagactgtcttgattcaagaattgatcaacaacattgccaaggctcacggtggttactctatcttctgtggtgtcggtgaacgtactcgtgaaggcaacgatttgtaccacgaaatgatttccactggtgtcatcaagcttgaaggtgaatccaagtgtgctcttgtctttggtcaaatgaacgaaccccccggagctcgtgcccgtgttgccttgactggtttgaccattgccgaatacttccgtgatgaggaaggtcaagatgtgttgctcttcattgacaacattttccgtttcactcaagccggttctgaagtgtccgctttgcttggtcgtattccctctgctgtcggttaccaacccactctytccactgatatgggtggtatgcaagagcgtattactaccaccaagaacggttccattacctccgtgcaagctgtctacgtccctgctgacgatttgactgatcctgctcctgctactacttttgctcacttggacgccaccactgtgttgtctcgttccattgctgagttgggtatctaccctgctgtcgatccccttgactccaagtcccgtatcttggatccccgtatcgttggtgatgagcactactctgttgccactggtgtccaacaaatccttcaaaactacaagtcgcttcaaga

SEQ ID NO: 769 - DNA, 1343 bp, Alternaria alternata
  ref <308>: DATABASE ACCESSION NUMBER: ATCC 62099
cgcggttccaaggccaccgacaccggtgcccccatcaagattcccgttggtcacggtacccttggtcgtatcatgaacgtcactggtgaccccattgacgagcgtggtcccatcaaggccaccaagtacgctcccatccacgccgaccccccggagttcaccgagcaatccacctccgctgaggtcctcgttaccggtatcaaggttgtcgacctgttggctccttacgctcgtggtggaaagattggtctcttcggaggtgctggtgtcggaaagactgtcttcattcaggagctgattgtaaggagacacactgtctactggctgagcattagctaacggcaggcagaacaacatcgccaaggcccacggtggtttctctgtcttcactggtgtcggtgagcgtacccgtgagggtaacgatctgtaccacgagatgcaggagacttccgtcattcagcttgacggtgactccaaggtcgccctcgtcttcggtcagatgaacgagcccccgggtgcccgtgcccgtgtcgctcttactggtcttactgttgctgagtaagtcttgaattcactgtgttgacaacgtcgtggctaatgggaaaaaagatacttccgtgacgaagagggacaggatgtgcttctcttcatcgacagtaagtgcttgtacgaactgcctgtgagacatacactgacttcggcaatagacattttccgtttcacccaggccggttccgaggtgtccgctcttcttggtcgtatcccctctgccgtcggttaccagcccaccctcgccattgacatgggtgtcatgcaggagcgtattaccaccaccaccaagggttccatcacctccgtccaggccgtctacgtgcccgctgacgatttgactgaccctgcccccgccaccaccttcgcccatttggacgccaccactgtcttgtcccgtggtatctccgagttgggtatctaccccgccgtcgaccctcttgactccaagtcccgtatgttggacccccgtgtcattggtcaggaccactacgacaccgccacccgcgttcagcagattctccaggagtacaagtcgctccaggatatcattgccattctcggtatggacgagttgtcggaagctgacaagcttaccgtcgagcgtgcccgtaagatccagcgtttcttgagccagcctttcgctgtcgcccaggtcttcactggtattgagggcaagcttgtcgacctcaaggacaccatccgatcattcaaggctatcttgactggtgagggtgacgaccttcccgagggtgagtctcgactatctccgcattcatagcgtataactgaca

SEQ ID NO: 770 - DNA, 480 bp, Aspergillus flavus
  ref <308>: DATABASE ACCESSION NUMBER: ATCC 26947
ttcaggagttgattgtatgttcacctgcaacataagacttcccattctccactcttttctaactcttcacagaacaacattgccaaggctcacggtggttactctgtcttcactggtgtcggtgagcgtacccgtgagggtaacgatctgtaccacgaaatgcaggagactggtgtcattcagctcgagggtgaatctaaggtcgcccttgtcttcggtcagatgaacgagcccccaggtgcccgtgcccgtgtcgcccttaccggtctgaccatcgccgagtacttccgtgacgaggaaggtcaggatgtgctgctcttcattgacaacattttccgtttcacccaggccggttctgaggtgtctgcccttcttggtcgtatcccctccgctgtcggttaccagcccactctggccgtcgacatgggtggtatgcaggagcgtattaccaccaccaccaagggttccattacctccgtc

SEQ ID NO: 771 - DNA, 1174 bp, Mucor circinelloides
  misc_feature (1)...(1174): n=a,t,c or g
  ref <308>: DATABASE ACCESSION NUMBER: ATCC 38592
ctcgaacaagayaacttgccygccattttgaacgcccttgaagtcaaggaycactctggtggacgtctcgtyctcgaagtctctcaacatttgggtgagaacactgtccgtactattgctatggatggtactgaaggtaagttatgtycatcccannggatacagtcaracagmaatgtctagtggttatagcagyagcagatgattgaccaatatgttaggtcttgtccggtggtcaaaaggttgttgacactggtgctcccattaccatccccgttggtaaggaagtccttggtcgtatcatcaacgttattggtgaacccattgatgaacgtggtcccattgacgccaagactcaccgtcctattcacgctgaagctcccgaattcgttgatcaatcccccactcccgaaatcctcgagactggtatcaaggtygtcgatttgttggctccttatgctcgtggtggtaagattggtctcttcggtggtgctggtgtcggtaagactgtcttgattcaagaattgattaacaacatygccaaggctcacggtggttactctatcttctgtggtgtcggtgaacgtactcgtgagggtaacgatttgtaccatgaaatgattgaaaccggtgtcattcaattggaaggcgagtccaagtgtgctctcgtctttggtcaaatgaacgaacccccaggtgctcgtgcccgtgtcgctttgactggtttgactattgctgaatacttccgtgatgatgagggtcaagatgtcttgcttttcattgataacattttcagattcactcaagctggttctgaggtatctgcccttttgggtcgtattccttccgctgtcggttaccaacccactctttccacygatatgggtggtatgcaagagcgtattactaccaccaagaacggttccattacctccgtccaagctgtctacgtccctgctgatgatttgaccgatcctgctcctgccaccacttttgctcacttggatgccaccactgtcttgtctcgttccatcgctgaattgggtatctaycccgctgtcgatcctcttgattccaagtctcgtatcctcgatccccgtattgtcggtgatgagcactacaaggttgccactgaagttcaacaaatcctccaaaactacaagtctctccaaga

SEQ ID NO: 772 - DNA, 467 bp, Piedraia hortai
  ref <308>: DATABASE ACCESSION NUMBER: ATCC 24292
aggagcttatcaacaacatcgccaaggctcacggtggttactccgtcttcactggtgtcggtgagcgtactcgtgagggtaacgatttgtaccacgagatgcaagagacttccgtcattcagcttgacsgcgagtccaaggtcgctctcgtgttcggtcagatgaacgagcccccgggtgcccgtgcccgtgttgccctgactggtcttaccatcgctgagtacttccgtgatgccgagggtcaggatggtaagttctataactcttgtcgcaaaggtttcattctggtcgctaacttgctcagtgctcctgttcatcgacaacattttccgtttcacccaggctggtatggaggtgtctgccctcctcggtcgtattccttctgccgtcggttaccaacctactctcgccgtcgacatgggtggtatgcaagagcgtattaccactaccaagaagggatccattac

SEQ ID NO: 773 - DNA, 578 bp, Pseudallescheria boydii
  ref <308>: DATABASE ACCESSION NUMBER: ATCC 44331
ttgccaaggcccacggtggttactctgtcttcactggtgtcggtgagcgtacccgtgagggtaacgatctgtaccacgaaatgcaggaaacctccgtcattcagcttgatggcgagtccaaggtcgcgcttgtcttcggtcagatgaacgagccccctggtgcccgtgctcgtgtcgctcttactggtcttaccgttgccgagtacttccgtgatgaggagggtcaggatggtaagttatatcgtttttattatcttctttgccaccacccctctacgaatccatgcctccgttggtgaaggcatcgtttgtagggcgggtcggagtttgcggcaatttctgccgtcggcttgaagccgcggatgcccgatgtttgacgcgtatcgatgctaacaacaatgacaacagtgcttctcttcattgacaacattttccgattcacccaggccggttccgaggtgtctgcccttctcggtcgtattccctctgccgtcggttaccagcccactcttgccgtagacatgggtgccatgcaggaacgtattaccaccaccaagaagggttcgattacctccgtc

SEQ ID NO: 774 - DNA, 1123 bp, Rhizopus oryzae
  ref <308>: DATABASE ACCESSION NUMBER: ATCC 56015
aacttaccygctatcttgaacgctctcgaagtccaagatcactctggtggacgtcttgtccttgaagttcgctcaacacttgggtgaaaatactgtccgtactattgctatggatggtactgaaggtaagctatactataaccgtkttatccgagtatgatattaacttgaaaaaaggtctcgtycgtggtcaaaaggttattgacactggtgctcccattaccattcctgytggtaaggaagttctcggtcgtatcattaacgtcattggtgaacccatcgatgaacgtggtcctatcaacgccaagagccaacgtcccattcacgccgaagctcccgaattcgttgaccaatctcctactcccgaaattcttgaaactggtatcaaggttgtcgacttgttggctccttatgctcgtggtggtaagattggtcttttcggtggtgctggtgtcggtaagactgtgttgattcaagaattgattaacaacatcgccaaggctcacggtggttactctattttctgtggtgtcggtgaacgtactcgtgaaggtaacgatctttaccacgaaatgattgaaactggtgtcatcaagctcgatggtgactccaagtgtgctcttgtctttggtcaaatgaacgaacccccaggagctcgtgcccgtgttgccttgactggtttgaccattgctgaatacttccgtgatgatgaaggtcaagatgtgttgcttttcattgataacattttccgtttcacccaagctggttcwgaagtatctgcccttttgggtcgtattccctccgctgtcggttaccaacccactctttctactgatatgggtggtatgcaagaacgtattacaaccaccaagaacggttccattacatccgtccaagctgtctacgtccctgctgatgatttgaccgatcctgctcccgccaccacttttgctcacttggatgccaccactgtcttgtctcgttccattgccgaattgggtatttaccctgccgtcgatcctcttgaytccaagtctcgtatcttggatcctcgtatcgttggtgacgaacactacaaggtcgctaccgaagttcaacaaatccttcaaaactacaagtctct

SEQ ID NO: 775 - DNA, 477 bp, Scopulariopsis koningii
  ref <308>: DATABASE ACCESSION NUMBER: ATCC 38745
attcaggagctcatcaacaacattgccaaggctcacggtggttactctgtgttcactggtgtcggtgagcgtacccgtgagggtaacgatctgtaccacgaaatgcaggagacttcggtcattcagctcgagggcgagtccaaggtcgcgcttgtgttcggtcagatgaacgagccccccggtgcccgtgcccgtgtcgcccttaccggtctgaccgttgccgagtacttccgtgacgaggagggccaggatggtgagtaaccgacgaagtctgagatcttgtcgggcattattctaacgacaactagtgcttctcttcatcgacaacattttccgcttcacccaggccggttccgaggtgtccgcgcttctcggccgtatcccctctgccgtcggttaccagcccaccctggccgtcgacatgggaggtatgcaggagcgtattaccacgactcagaagggctcgattacctcggt

SEQ ID NO: 776 - DNA, 610 bp, Trichophyton mentagrophytes
  ref <308>: DATABASE ACCESSION NUMBER: ATCC 8125
tccggagttgattgtaagtcatttgaaacccagccccaagaaacagaagctaggcgaaaattggacaattgagcaatttagccattggagaaaagaaatttcgagtattaattgtttttatagaacaacattgccaaggctcacggtggttactctgtcttcactggtgtcggagagcgtacccgtgaaggaaacgatctctaccatgaaatgcaggagacccgtgtcattcagcttgatggcgagtccaaggtcgccctggtcttcggccagatgaacgagcccccaggtgcccgtgcccgtgttgctcttactggtttgaccattgctgagtacttccgtgatgaggaaggtcaagacggtgagtttyttatggataaaarattttttttttttttttttttttmaaraaattcatgttctaacaaagtatatcctagtgcttctcttcatcgacaacattttccgtttcactcaggctggttccgaagtgtctgccctgcttggtcgtatcccatctgccgtcggttaccaacccactcttgccgtcgacatgggtggtatgcaggaacgtattaccaccaccaagaagggatccattacctccgtc

SEQ ID NO: 777 - DNA, 593 bp, Trichophyton tonsurans
  ref <308>: DATABASE ACCESSION NUMBER: ATCC 56185
ggagttgattgtaagtcatttgaaacccagccccaagaaacagaagctaggtgaaaattggacaattgaacaatttagcccttggagaaaagaaatttcgagtattaattatttttatagaacaacattgccaaggctcacggtggttactctgtcttcactggtgtcggagagcgtacccgtgaaggaaacgatctctaccatgaaatgcaggagacccgtgtcattcagcttgatggcgagtccaaggtcgccctggtcttcggccagatgaacgagcccccaggtgcccgtgcccgtgttgctcttactggtttgaccattgctgagtacttccgtgatgaggaaggtcaagacggtgagtttcttatggatgaaagatttttttttttcaagaaattcatgttctaacaaagtgtattctagtgcttctcttcatcgacaacattttccgtttcactcaggctggttccgaagtgtctgccctgcttggtcgtatcccatctgccgtcggttaccaacccactcttgccgtcgacatgggtggtatgcaggaacgtattaccaccaccaagaagggatccattacctcc

SEQ ID NO: 778 - DNA, 1141 bp, Trichosporon cutaneum
  ref <308>: DATABASE ACCESSION NUMBER: ATCC 62965
ccgtggtcaagaagttattgacactggtgccccaattaccattcctgttggtcgtggtactcttggtagaattatcaacgtcattggtgaaccaattgacgaacgtggccctatcaaggcttctaagtatgctcctatccatactgaaccaccaacctttgctgaacaatctacttctgctgaagttcttgaaaccggtatcaaggttgtcgatcttcttgctccttacgcccgtggtggtaagattggtcttttcggtggtgctggtgtcggtaagactgtcttcattcaagaacttattaacaacattgccaaggctcacggtggtttctctgtcttcactggtgtcggtgaaagaacccgtgaaggtaacgatctttaccgtgaaatgaaggaaactggtgtcatcaacctcgaaggtgactccaaggtcgctctcgttttcggtcaaatgaacgaacctccaggtgcccgtgcccgtgtcgctttgactggtcttaccattgccgaatacttccgtgatgaagaaggacaagatgtcttgcttttcgttgacaacattttcagattcacccaagccggttctgaagtctctgctcttttgggtcgtattccatctgccgtcggttaccaacctacccttgctaccgatatgggtgccctccaagaacgtattaccaccacccaaaagggttccgtcacatctgtccaagccgtctatgtcccagcagacgatttgactgatcctgccccagccaccactttcgctcacttggacgccaccactgtcttgtctcgttccatttccgaattgggtatctacccagctgtcgatcctctcgattccaagtctcgtcttttggatcctgaagttattggacacgaacactacgaagttgccactcaagttcaacaaaccctccaagcttacaagtctctccaagatatcattgccattttgggtatggatgaattgtctgaagctgataagcttactgtcgaacgtgcccgtaagatccaaagattcctttcccaaccattcgctgttgccgaagttttcactggtatcgaaggtcgtctcgttccattgaaggaaaccgtcagatctttcaaggaaatccttgaaggtaagtacgatcac

SEQ ID NO: 779 - DNA, 1093 bp, Cladophialospora carrionii
  ref <308>: DATABASE ACCESSION NUMBER: ATCC 22864
gctgaaggccgaacgtgagcgtggtatcaccatcgatatcgcgctctggaagttcgagactcccaagtacttcgtcaccgtcatcgatgcccctggtcatcgtgacttcatcaagaacatgatcactggtacctcccaggctgattgtgctattctcatcattgccgctggtactggtgagttcgaggccggtatctccaaggatggccagacccgtgagcatgctctgctcgcctacaccctgggcgtgaagcagcttatcgtcgccatcaacaagatggacaccaccaaatggtctgaggatcgtttcaacgaaatcatcaaggagacttccaacttcatcaagaaggtcggatacaaccccaagtccgttccattcgtgcccatctccggcttcaacggtgacaacatgatcgacgtctccaccaatgccccctggtacaagggctgggaaaaggagtccaaggctggcaaggccaccggcaagaccctccttgaggctatcgactccatcgaccctcctgctcgtcccaccgacaagcctctccgtctcccactccaggatgtctacaagatttctggtatcggcacggtgcccgtcggtcgtgttgagactggtaccatcaaggccggtatggtcgtcacctttgcccccgccaacgtcaccactgaagtcaagtccgtcgaaatgcaccacgaacagctcgccgagggcgttccgggtgacaacgtcggcttcaacgtcaagaacgtctccgtgaaggaggttcgtcgtggaaacgttgctggtgactccaagaacgacccccccaagggtgccgactccttcaacgcccaggtcatcgtcctcaaccaccctggtcaggtcggtgctggctacgccccggtcttggattgccacactgcccacattgcctgcaagttctctgagctcctcgagaagatcgatcgtcgtaccggcaagtccatggaaaacaaccccaagttcatcaagtctggtgatgctgccatcgtgaagatggttcccagcaagcctatgtgcgttgaggctttcaccgactaccctcctcttggtcgtttcgccgtccgtgac

SEQ ID NO: 780 - DNA, 752 bp, Cunninghamella bertholletiae
  ref <308>: DATABASE ACCESSION NUMBER: ATCC 42115
tacttgtaaatggtctcaagatcgttacaacgaaattgttaaggaagtttcttccttcatcaagaagattggttacaatcctaaatccgttcctttcgtycctatctctggttggcacggtgataacatgttggaagcttctaccaacatgccttggtacaagggatggaccaaggaaactaaagctggttcttccactggtaagactctcttagaagccattgacagcattgaacctcctacccgtccttctgacaagcctttacgtcttcctttacaagatgtttacaagattggtggtattggtactgtccctgttggtcgtgttgaaactggtgtcatcaaggctggtatggttgttacyttcgctcccgctaacgtcaccactgaagttaagtccgttgaaatgcatcacgaacaattagaacaaggtgttcctggtgacaacgttggtttcaacgtcaagaacgtttccgttaaggatatccgtcgtggtaacgtctgttccgactccaagaacgaccccgctaaggaatctgcttccttcaacgctcaagttatcgtcttgaaccaccctggtcaaattggtgctggttatgccccagttcttgactgtcacactgctcacattgcttgtaagttcgctgaattattagaaaagatcgatcgtcgttccggtaagaaactcgaagatgctcctaaattcgttaaatctggtgactctgctatcgttaagatggttccttccaagc

SEQ ID NO: 781 - DNA, 728 bp, Curvularia lunata
  ref <308>: DATABASE ACCESSION NUMBER: ATCC 26425
caagtggtctgaggaccgttaccaggaaatcatcaaggagacctccaacttcatcaagaaggtcggctacaaccccaagcacgttcccttcgtccccatctccggtttcaacggagacaacatgattgaggcctccaccaactgcccctggtacaagggttgggagaaggagaccaaggccaaggccactggtaagaccctccttgaggccatcgacgccatcgaccctcctgtccgtcctaccgacaagcccctccgccttcccctccaggatgtttacaagattggtggtattggcacggtccccgtcggtcgtgtcgagaccggtatcatcaagcccggtatggtcgtcaccttcgcccccgctggtgtcaccaccgaagtcaagtccgtcgagatgcaccacgagcagcttactgagggtgtccccggtgacaacgtcggcttcaacgtcaagaacgtctccgtcaaggagatccgtcgtggtaacgttgccggtgactccaagaacgacccccccaagggttgcgagtccttcaacgcccaggtcatcgtcctcaaccaccctggtcaggtcggtgccggttacgccccagtccttgactgccacactgcccacattgcctgcaagttctccgagctcctcgagaagatcgaccgccgtaccggaaagtctgttgagaactcccccaagttcatcaagtccggtgacgccgccatcgtcaaga

SEQ ID NO: 782 - DNA, 1145 bp, Fonsecaea pedrosoi
  ref <308>: DATABASE ACCESSION NUMBER: ATCC 18831
tgaagtccgagcgtgagcgtggtatcaccatcgatatcgccctctggaagttcgagactcccaagtaaggctcaacagacacaacaagcaaatgcatactcgctaacctattcacccaccacaggtacaacgtcaccgtcattgacgcccccggtcaccgtgatttcatcaagaacatgatcactggtacctcccaggctgactgcgccattctcatcattgccgccggtactggtgagttcgaggccggtatctccaaggacggtcagacccgtgagcacgctcttctcgcctacacccttggtgtcaagcagctcatcgttgccatcaacaagatggacaccaccaagtggtctgaggcccgttaccaggagatcatcaaggagacctccggtttcatcaagaaggtcggcttcaaccccaagcacgttcccttcgtgcccatctccggtttcaacggtgacaacatgatcgacgtctccaccaactgcccctggtacaagggttgggagaaggagaccaaggccaaggccaccggcaagaccctcctcgaggccattgacgccatcgacccccccactcgtcccaccgacaagcccctccgtcttcccctycaggatgtctacaagatcggtggtattggcacggttcccgtcggtcgtgtcgagaccggtaccatcaaggccggcatggtcgtcaccttcgcccccgctggtgtcaccactgaggtcaagtccgtcgagatgcaccacgagcagcttcccgagggtctccccggtgacaacgtcggcttcaacgtcaagaacgtctccgtcaaggagatccgtcgtggcaacgtcgccggtgactccaagaacgacccccccaagggctgcgacagcttcaacgcccaggtcatcgtcctcaaccaccccggtcaggtcggcgccggctacgcgcccgtcctcgactgccacactgctcacattgcttgcaagttctctgagctcctcgagaagatcgaccgccgtaccggcaagtccattgaggccagccccaagttcatcaagtctggtgacgccgccatcgtcaagatggttccctccaagcctatgtgcgttgaggccttcaccgactacccccctcttggacgtttcgccgtccgt

SEQ ID NO: 783 - DNA, 1151 bp, Microsporum audouinii
  ref <308>: DATABASE ACCESSION NUMBER: ATCC 11347
gctcaaggctgagcgtgagcgtggtatcaccattgacatcgccctctggaagttcgagacccccaagtacatggtcaccgtcatcggtatgctttatctgtttcccatttatagttgcgacaagtaactaataaaaagtagatgcccccggacaccgtgacttcatcaagaacatgattactggtacctcccaggccgactgcgctattctcatcattgctgccggtactggtgagttcgaggctggtatctccaaggatggccagactcgtgagcacgccctgctcgctttcaccctcggtgtcaagcagctcatcgttgccatcaacaagatggacaccaccaactggtctgagtcccgtttcggtgaaatcatcaaggaagtcaccaacttcatcaagaaggtcggctacgaccccaagggtgtcccattcgtcccaatctctggcttcaacggtgacaacatgattgagccctccaccaactgcccatggtacaagggatggaacaaggagaccaaggccggtggcaaatcctctggtaagaccctccttgaggccatcgatgccattgacatgcccactcgtcccaccgacaagcctctccgtctcccactccaggatgtctacaagatctctggtatcggaacagtaccagtcggtcgtgttgagactggtatcatcaagcctggtatggttgtcactttcgcccccgccaacgtcaccactgaagtcaagtccgtcgaaatgcaccaccagcagctcgttcagggtgttcccggtgacaacgttggcttcaacgtcaagaacgtctctgtcaaggaagtccgccgtggtaacgttgccggtgattccaagaacgacccaccatctggctgcgcctctttcaaggcccaggtcatcgtcctcaaccaccccggccagatcggtgctggttacgccccagtcctcgactgccacactgcccacattgcttgcaagttctctgagcttcttgagaagattgaccgccgtactggtaaatccgtcgaaaccagccctaagttcgtcaagtctggtgatgccgctattgccaccatggttccatccaagcccatgtgcgttgaggctttcactgactacccaccacttggtcgtttcgccgtccgtgac

SEQ ID NO: 784 - DNA, 979 bp, Mucor circinelloides
  ref <308>: DATABASE ACCESSION NUMBER: ATCC 38592
ccaagtggtctcaagatcgttacaacgaaattgtcaaggaagtttccggtttcatcaagaagatcggtttcaaccccaagtccgttcctttcgttcccatttctggctggcacggtgataacatgttggatgaatccaccaacatgccctggttcaagggatggaacaaggagaccaaggccggttccaagactggtaagactctcctcgaagccatcgatgccattgagccccctgtccgtccttctgacaagcctctccgtcttcctcttcaagatgtctacaagattggtggtattggtacagttcccgtcggtcgtgttgaaactggtactatcaaggctggtatggttgtcaacttcgctcccgctgctgtcaccactgaagttaagtccgttgaaatgcatcacgaaaccctctctgaaggtctccccggtgacaacgttggtttcaacgtcaagaacgtctccgtcaaggatatccgtcgtggtaacgtctgttccgactccaagaacgatcccgctaaggaatctgcctctttcactgctcaagttattatcttgaaccatcccggtcaaatctctgctggttacgcaccagttctcgattgtcacactgctcacatcgcctgtaagttctctgaactcattgagaagattgatcgtcgttccggtaagtacctgcatctgtcagaattgaaggtccgccgttatagcaaaggctgggtttaaatgttggggtttgtctgatctataatgatgattgctccttcaatttttgacataatttgatgatctgaattgtgttgctaacgtcgcatttgcttcttttgcttcttttgcatgtaggtaagaagatggaagatgctcccaaagtaagtattacgattgatggacaattaaaatagaatactaacaattattgtttatagttcgtcaagtctggtgactctgctatcgtcaagatggttccctccaag

SEQ ID NO: 785 - DNA, 1099 bp, Phialaphora verrucosa
  ref <308>: DATABASE ACCESSION NUMBER: ATCC 38561
ggacaagctgaaggccgaacgtgagcgtggtatcaccatcgatatcgcgctctggaagttcgagactcccaaatacttcgtcaccgtcattgatgcccctggtcatcgtgacttcatcaagaacatgatcactggtacctcccaggctgattgtgccatcctcatcattgccgccggtaccggtgagttcgaagccggtatctccaaggatggccagacccgtgagcacgctctcctcgcctacaccctaggtgtgaagcagcttatcgtcgccatcaacaagatggacaccgccaaatggtccgaggatcggttcaacgaaatcatcaaggagacttccaacttcatcaagaaggtcggatacaaccccaagtccgtcccgttcgtgcccatctccggtttcaacggtgacaacatgatcgacgtctcctccaacgccccctggtacaagggttgggagaaggagaccaaggccggcaaggccactggcaagaccctcctcgaggccatcgacgcgattgaccctcctactcgtcccaccgacaagcccctccgtctccctctccaggatgtctacaagatctctggtatcggcacggtgcccgttggtcgtgttgagaccggtaccatcaaagccggtatggtcgtcaccttcgctcccgccaacgtcaccactgaagtcaagtccgtcgaaatgcaccacgaacagctcgccgaaggtgttccaggtgacaatgtcggcttcaacgtcaagaacgtctccgtcaaggaggttcgtcgtggaaacgttgccggtgactccaagaatgacccccccaagggtgccgactccttcaacgctcaggtcatcgtcctcaaccaccctggtcaggtcggtgccggctacgccccggtcttggattgccacactgcccacattgcttgcaagttctctgagctcctcgagaagatcgatcgtcgtaccggcaagtccatggaaaacaaccccaagtttatcaagtctggtgatgctgccatcgtgaagatggttcccagcaagcctatgtgcgttgaggccttcaccgactatcctcctcttggtcgtttcgccgtccgtgac

SEQ ID NO: 786 - DNA, 750 bp, Saksenaea vasiformis
  ref <308>: DATABASE ACCESSION NUMBER: ATCC 60625
accaccaagtggtctgaggcccgttaccaggagatcatcaaggagacctccggyttcatcaagaaggtcggcttcaaccccaagcacgttcccttcgtgcccatctccggtttcaacggtgacaacatgatcgacgtctccaccaactgcccctggtacaagggttgggagaaggagaccaaggccaaggccaccggcaagaccmtcctcgaggccattgacgccatcgaccccccyagycgtcccaccgacaagcccctycgtcttcccctmcaggatgtytacaagattggcggtattggcacggttcccgtcggtcgtgtygagaccggtrccatcaagggtggcatggtcgtcaccttcccccccgctggtgtcaccactgaggtcaagtccgtcgagatgcaccacgagcagctcgccgagggtstccccggtgacaacgtcggcttcaacgtcaagaacgtctccgtcaaggagatccgtcgtggcaacgttgccggtgactccaagaacgacccccccaagggctgcgacagcttcaacgcccaggtcatcgtcctcaaccaccccggtcaggtcggcgccggctacgcgccsgtcctsgactgccacactgctcacattgcctgcaagttctctgagctcctcgagaagatcgaccgccgttccggcaagtccatcgagtccggccccaagttcatcaagtctggtgacgccgccatcgtcaagatggttccctccaagccc

SEQ ID NO: 787 - DNA, 1084 bp, Syncephalastrum racemosum
  ref <308>: DATABASE ACCESSION NUMBER: ATCC 32330
gctcaaggccgagcgtgagcgtggtatcaccatcgatatcgctctctggaagttcgagacccccaagtaccacgtcaccgtcattgatgcccccggccatcgtgatttcatcaagaacatgatcactggtacctcgcaggctgactgcggtatcctcatcattgccgccggtactggtgagttcgaggctggtatctccaaggatggccagacccgtgagcacgctctgcttgccttcaccctcggtgtccgtcagctgatcgtcgccatcaacaagatggactcgaccaagtactctgaggcccgttacaacgaaatcgtcaaggaggtctccaccttcatcaagaagatcggtttcaaccccaagtccgttcccttcgtccccatctctggctggaacggtgacaacatgttggaggagtcctccaacatgccctggttcaagggctggaagaaggagaccaaggctggcgagaagtccggcaagaccctccttgaggccattgacaacattgaccccccggtccgtccctcggacaagcccctccgtcttcccctccaggatgtctacaagatcggtggtatcggcacagtccccgtcggtcgtgtcgagactggtgtcatcaaggctggtatggtcgtgaccttcgcccccgccaacgtcaccactgaagtcaagtccgtcgagatgcaccacgagcagctcgtcgagggtgtccccggtgacaacgtcggtttcaacgtcaagaacgtttccgtcaaggatatccgccgtggtaacgtctgctctgactccaagaacgaccccgccaaggagtctgcctcgttcaccgcccaggtcatcgtcctgaaccaccccggtcagatcggtgccggttacgccccggttcttgactgccacaccgctcacattgcctgcaagttcgctgagctcctcgagaagatcgaccgtcgttccggyaagaagctcgaagagtcccccaagttcgtcaagtcgggtgactccgccatcgtcaagatggttccctccaagcccatgtgcgttgaggcctacactgagtacccccctcttggccgtttcgcc

SEQ ID NO: 788 - DNA, 1155 bp, Trichophyton tonsurans
  ref <308>: DATABASE ACCESSION NUMBER: ATCC 56185
gctcaaggccgagcgtgagcgtggtatcaccatcgatatcgccctctggaagttcgagacccccaagtacaatgtcaccgtcattggtatgtttttctttacctttcccctccatcgtcttgctgtgccataactaacgagagtagacgcccccggtcaccgtgacttcatcaagaacatgatcactggtacctcccaggctgactgtgctattctcatcattgctgccggtactggtgagttcgaggctggtatctccaaggatggccagacccgtgagcacgctctgctcgccttcacccttggtgtcaagcagctcatcgttgccatcaacaagatggacaccaccaactggtccgaggaccgtttcaaggaaatcatcaaggaagtcaccaacttcatcaagaaggttggctacgaccccaagggtgttccattcgttccaatctctggtttcaacggtgacaacatgattgaggcctccagcaactgcccatggtacaagggatggaacaaggagaccaaggccggtggtgccaagactggcaagaccctyctcgaggccatcgatgccatcgacatgccaacccgtcctaccgacaagcccctycgtctcccactccaggatgtctacaagatctctggtatcggaactgtaccagtcggtcgtgttgagaccggtatcatcaagcctggtatggtcgtcaccttcgcccctgccaacgtcaccactgaagtcaagtccgtcgaaatgcaccaccagcagcttcagcagggtgtccccggtgacaacgtcggcttcaacgtcaagaacgtttccgtcaaggaagtccgccgtggtaacgttgccggtgactccaagaacgacccaccatccggctgtgcctccttcaacgcccaggtcatcgtcctcaaccaccccggccagatcggtgctggttacgccccagtcctcgactgccacactgctcacattgcttgcaagttcgctgagctcctcgagaagattgaccgccgtaccggtaaatccgtcgaagccaaccccaagttcgtcaagtctggtgatgccgctatcgccaagatggttccctccaagcccatgtgcgttgaggctttcactgactaccccccacttggtcgtttcgccgtccgtga

SEQ ID NO: 789 - DNA, 1138 bp, Trichophyton mentagrophytes
  ref <308>: DATABASE ACCESSION NUMBER: ATCC 8125
tcaaggccgagcgtgagcgtggtatcaccatcgatatcgccctctggaagttcgagacccccaagtacaatgtcaccgtcattggtatgtttctctttacctttcccctccatcgtcttgctgtgccataactaacgagagtagacgcccccggtcaccgtgacttcatcaagaacatgatcactggtacctcccaggctgactgtgctattctcatcattgctgccggtactggtgagttcgaggctggtatctccaaggatggccagacccgtgagcacgctctgctcgccttcacccttggtgtcaagcagctcatcgttgccatcaacaagatggacaccaccaactggtccgaggaccgtttcaaggaaatcatcaaggaagtcaccaacttcatcaagaaggttggctacgaccccaagggtgttccattcgttccaatctctggtttcaacggtgacaacatgattgaggcctccaccaactgcccatggtacaagggatggaacaaggagaccaaggccggtggtgccaagactggcaagaccctcctcgaggccatcgatgccatcgacatgccaacccgtcctaccgacaagcccctccgtctcccactccaggatgtctacaagatctctggtatcggaactgtaccagtcggtcgtgttgagaccggtatcatcaagcccggtatggtcgtcaccttcgcccctgccaacgtcaccactgaagtcaagtccgtcgaaatgcaccaccagcagcttcagcagggtgtccccggtgacaacgtcggcttcaacgtcaagaacgtttccgtcaaggaagtccgccgtggtaacgttgccggtgactccaagaacgacccaccatccggctgtgcctccttcaacgcccaggtcatcgtcctcaaccaccccggccagatcggtgctggttacgccccagtcctcgactgccacactgctcacattgcttgcaagttcgctgagctcctcgagaagattgaccgccgtaccggtaaatccgtcgaagccaaccccaagttcgtcaagtctggtgatgccgctatcgccaagatggttccatccaagcctatgtgcgttgaggctttcactgactaccccccacttggtcg

SEQ ID NO: 790 - DNA, 748 bp, Bipolaris hawaiiensis
  ref <308>: DATABASE ACCESSION NUMBER: ATCC 26067
caccaccaagtggtctgaggagcgttaccaggaaatcatcaaggagacctccaacttcatcaagaaggtcggctacaaccccaagcacgttcccttcgtccccatctctggtttcaacggagacaacatgattgaggcttccaccaactgcccctggtacaagggttgggagaaggagaccaaggccaaggccactggtaagacccttctcgaggccatcgacgccatcgacccccctgtccgtcctaccgacaagcccctccgccttcccctccaggatgtgtacaagattggtggtattggcacggttcccgtcggtcgtgtcgagaccggtatcatcaagcccggtatggtcgtcaccttcgcccccgctggtgtcaccactgaagtcaagtccgtcgagatgcaccacgagcagcttgccgagggtgtccccggtgacaacgtcggcttcaacgtcaagaacgtctccgtcaaggagatccgtcgtggtaacgttgccggtgactccaagaacgacccccccaagggttgcgagtccttcaacgcccaggtcatcgtcctcaaccaccccggtcaggtcggtgccggttacgcaccagtccttgactgccacactgcccacattgcttgcaagttctccgagctcctcgagaagattgaccgccgtaccggaaagtctgttgagaactcccccaagttcatcaagtccggtgacgccgccatcgtcaagatggttccctccaag

SEQ ID NO: 791 - DNA, 958 bp, Aspergillus fumigatus
  ref <308>: DATABASE ACCESSION NUMBER: ATCC 14110
cgctattgtcgttgttgctgcctccgacggtcagatgtaggtggaacatcttgggaaatacgtcgtaaaacacggcgcttacgttttcgcgaataggccccagactcgtgagcatttgctgctcgcccgccaggttggtgtccagaagatcgttgtcttcgtcaacaaaatcgatgctattgatgatccggagatgctggaactggtcgaactcgagatgcgtgagctgctgaacagctacggtttcgagggtgaagagactccgatcattttcggttccgctctctgtgctctcgaaggacgccgtgacgacatcggtaaagacagaattgagcagcttatgaacgctgtcgacacctggatccccactcctcagcgtgacctcgacaaacctttcttgatgtctgtcgaggaagtgttctctatcgccggccgtggtaccgtggcttctggtcgtgtcgagcgtggtatcttgaagaaggactctgaggttgagattgttggaggctccttcgaacccaagaagaccaaagtcaccgacattgaaaccttcaagaagagctgtgatgaatcgcgtgctggtgacaactctggtctcctcctgcgtggtatccgacgtgaagacgtcaagcgtggtatggtcattgctgttcccggcagcaccaaagctcacgacaagttcctcgtctccatgtacgtcctgaccgaggcggagggtggtcgtcgtactggcttcggtgccaactaccgtccccaagtcttcatccgtactgcaggtaagttcccgcacaccgtgtccagatcttccgagagattagcgatatatgctaatgattcatcagacgaggctgctgacctcagcttccctgacggcgaccaatctcgcagagttatgcctggtgacaacgtcgagatgatcctgaagacccaccaccctgttgctgctgaggctggtcaa

SEQ ID NO: 792 - DNA, 936 bp, Trichophyton mentagrophytes
  ref <308>: DATABASE ACCESSION NUMBER: ATCC 8125
cgttgtcgcagcttctgacggtcaaatgtaattgaatgcccgcccagacggatgaaaggatttgacgtttctaacatcattctaggcctcagaccagagaacatttgctccttgcccgccaggtcggtgtccagaagctggtcgttttcgttaacaaggtcgatgccgttgaggacccagagatgttggagcttgtcgaacttgaaatgcgtgaactcctcagccactacggtttcgagggtgaggagacccccatcatttttggctctgctctctgtgccctcgagtcccgtcgacctgagcttggtgtcgagaagattgacgagctattgaacgccgtcgacacctggatccccacccccgagcgcgccactgataagcctttcctcatgtccattgaggaagtgttctctatctctggtcgtggtaccgtcgtctccggtcgtgttgagcgtggtatcctcaagaaggattccgacgtcgaaattgttggtggctctaccacccctatcaagaccaaggtcacagatatcgaaaccttcaagaagtcctgcgatgaatctcgagctggtgacaactctggtctccttctccgaggtatcaagcgtgaggacttgaagcgtggaatggttgttgctgcccccggatccaccaaggctcacaccgacttcatggtctccctctacgtcctgactgaggctgagggtggtcgttccaacggcttcacccacaagtaccgcccccaaatgttcatccgtactgctggtatgtaacccaagtttccgctatttactaagtagatcattgctaacttgtatttccttccgtagacgaagccgcatctttcagctggcctggagaagaccaagacaagaaggctatgcctggtgacaacgtcgagatgatttgcaagaccctccaccccattgctgccga

SEQ ID NO: 793 - DNA, 20 bp, Artificial Sequence
  Synthetic DNA Sequence
ttattgttgctgctggtact

SEQ ID NO: 794 - DNA, 20 bp, Artificial Sequence
  Synthetic DNA Sequence
gacgacaagtcggtgaactt

SEQ ID NO: 795 - DNA, 20 bp, Artificial Sequence
  Synthetic DNA Sequence
acttgcacgcgatgtggcag

SEQ ID NO: 796 - DNA, 21 bp, Artificial Sequence
  Synthetic DNA Sequence
ggtccaatgccwcaaacwaga

SEQ ID NO: 797 - DNA, 27 bp, Artificial Sequence
  Synthetic DNA Sequence
cattaagaatggyttatctgtskctct

SEQ ID NO: 798 - DNA, 22 bp, Artificial Sequence
  Synthetic DNA Sequence
tggttgtcccagccgatcgttt

SEQ ID NO: 799 - DNA, 21 bp, Artificial Sequence
  Synthetic DNA Sequence
acctgtgaatacaagcaatct

SEQ ID NO: 800 - DNA, 24 bp, Artificial Sequence
  Synthetic DNA Sequence
gatgaaatcttcaacgaagttgat

SEQ ID NO: 801 - DNA, 20 bp, Artificial Sequence
  Synthetic DNA Sequence
acaacaccgagaagatccca

SEQ ID NO: 802 - DNA, 20 bp, Artificial Sequence
  Synthetic DNA Sequence
ttgccatttctggtttcgtt

SEQ ID NO: 803 - DNA, 20 bp, Artificial Sequence
  Synthetic DNA Sequence
acttcagtggtaacaccagc

SEQ ID NO: 804 - DNA, 20 bp, Artificial Sequence
  Synthetic DNA Sequence
cctgggacggcctctggcat

SEQ ID NO: 805 - DNA, 20 bp, Artificial Sequence
  Synthetic DNA Sequence
ctcttgtccatcttagcagt

SEQ ID NO: 806 - DNA, 21 bp, Artificial Sequence
  Synthetic DNA Sequence
agcatcaccagacttgataag

SEQ ID NO: 807 - DNA, 20 bp, Artificial Sequence
  Synthetic DNA Sequence
aaagtggcttcaaaggttgc

SEQ ID NO: 808 - DNA, 24 bp, Artificial Sequence
  Synthetic DNA Sequence
  modified_base (3): i
  modified_base (7): i
gcnttanwrgcattagaaraycca

SEQ ID NO: 809 - DNA, 24 bp, Artificial Sequence
  Synthetic DNA Sequence
tcttcctgtwgcaactgttcctct

SEQ ID NO: 810 - DNA, 24 bp, Artificial Sequence
  Synthetic DNA Sequence
agagmwacagataarscattctta

SEQ ID NO: 811 - DNA, 25 bp, Artificial Sequence
  Synthetic DNA Sequence
traartagaattgtggtctrtatcc

SEQ ID NO: 812 - DNA, 26 bp, Artificial Sequence
  Synthetic DNA Sequence
  modified_base (3): i
  modified_base (6): i
  modified_base (9): i
  modified_base (21): i
  modified_base (24): i
gtnacnggntcytyrarrttnccncc

SEQ ID NO: 813 - DNA, 22 bp, Artificial Sequence
  Synthetic DNA Sequence
aatcygtygaaatgcaycacga

SEQ ID NO: 814 - DNA, 20 bp, Artificial Sequence
  Synthetic DNA Sequence
  modified_base (3): i
  modified_base (15): i
gcnggcacgtacacngcctg

SEQ ID NO: 815 - DNA, 20 bp, Artificial Sequence
  Synthetic DNA Sequence
tggtgcatytckacrgactt

SEQ ID NO: 816 - DNA, 20 bp, Artificial Sequence
  Synthetic DNA Sequence
gctacgacgagatcaagggc

SEQ ID NO: 817 - DNA, 20 bp, Artificial Sequence
  Synthetic DNA Sequence
tggaagaaggccgaggagtt

SEQ ID NO: 818 - DNA, 20 bp, Artificial Sequence
  Synthetic DNA Sequence
agccgggctggatcttcttc

SEQ ID NO: 819 - DNA, 20 bp, Artificial Sequence
  Synthetic DNA Sequence
tcgagcttctggaggaagag

SEQ ID NO: 820 - DNA, 21 bp, Artificial Sequence
  Synthetic DNA Sequence
gaaggaggtgtctgcttacac

SEQ ID NO: 821 - DNA, 21 bp, Artificial Sequence
  Synthetic DNA Sequence
ggcgcaaacgtcaccacatca

SEQ ID NO: 822 - DNA, 21 bp, Artificial Sequence
  Synthetic DNA Sequence
cggcggatgtccttaacagaa

SEQ ID NO: 823 - DNA, 20 bp, Artificial Sequence
  Synthetic DNA Sequence
gagcggtatgaygagattgt

SEQ ID NO: 824 - DNA, 20 bp, Artificial Sequence
  Synthetic DNA Sequence
ggcttctgcggcaccatgcg

SEQ ID NO: 825 - DNA, 26 bp, Artificial Sequence
  Synthetic DNA Sequence
atgagcarcgsaaccatcgttcagtg

SEQ ID NO: 826 - DNA, 26 bp, Artificial Sequence
  Synthetic DNA Sequence
tcgatcgtgccgaccatgtagaacgc

SEQ ID NO: 827 - DNA, 446 bp, Clostridium novyi
  ref <308>: DATABASE ACCESSION NUMBER: ATCC 19402
caccaacttgctaaatggggagatgcccagattgttgtatatataggctgtggagaacgtggaaatgaaatgacagatgttcttaatgagtttccagaacttaaagatcctaagactggcaaatcaataatggaaagaacagttttaatagcaaatacttctaatatgccagttgcagcccgtgaagcttgtatatatacaggaatcacaatagcagaatattttagagatatgggatattcagtagcacttatggcggattccacttcacgttgggcagaggcattaagagaaatgtctggaagacttgaagaaatgcctggtgatgaaggttacccagcttatttaggatcaagacttgctgatttctatgaaagagctggaaaagttgtgtgtttaggagacgatgaaagagaaggtgccattactgcaataggtgctgtatc

SEQ ID NO: 828 - DNA, 445 bp, Clostridium difficile
  ref <308>: DATABASE ACCESSION NUMBER: ATCC 9689
cagcatcagcttgctaaatgggcagatgcagatatagttgtatatataggctgtggcgagcgtggaaatgaaatgacagatgttcttcttgaatttcctgaattaaaagacccaagaacaggcgagtcacttatgcaaagaactgtgcttatagcaaatacatcagatatgccggttgctgcacgtgaagcttctatatacactggtattacaatagctgaatattttagagatatgggatatagtgttgcacttatggcagactctacatcaagatgggctgaggctcttagagagatgagtggtcgtttagaggagatgcctggtgaagaaggttatcctgcatacttaggttcacgtcttgctcaattctatgagagagcaggaaaggtaaattgtctaggtatggatgaaagagaaggaacacttacagcaattggtgcag

SEQ ID NO: 829 - DNA, 445 bp, Clostridium septicum
  ref <308>: DATABASE ACCESSION NUMBER: ATCC 12464
atgctatagctaaatggggagacagcgaaatagttgtttacgttggatgtggagaacgtggtaacgaaatgacagacgttcttaacgaattcccagaacttattgacccaaaaactggggaaagtttaatgaagagaacagtacttatagctaatacttcaaacatgccagttgctgctagagaagcttgcatatacacaggtattacaatagctgaatacttcagagatatgggatactcagtatctataatggctgattcaacttcaagatgggcagaagcattaagagaaatgtcaggtagacttgaagaaatgccaggtgatgaaggatatccagcgtacttaggatcaagacttgctgattattacgaaagagcaggtaaggttgtttgtctaggtaaagatggtagagaaggtgctgtaacagcaattggagctgtatc

SEQ ID NO: 830 - DNA, 444 bp, Clostridium botulinum
  strain 20:3.1
tcaaattgctaaatggggagatgcagaaatcgttgtttacgttggatgcggagaacgtggtaacgaaatgacagacgttgttaatgagttcccagaacttattgaccctaagactggcgaaagcttaatgaagagaacagttcttatagctaatacttcaaacatgccagttgcagcgagagaagcttcaatatatacaggtatcacaatagctgaatatttcagagatatgggatatgcagtatcaataatggctgactcaacttcaagatgggctgaggcattaagagaaatgtctggtagacttgaagaaatgcctggtgatgaaggatatccagcttaccttggatcaagacttgctgattactatgaaagagctggtaaggttgaatgtttaggtaatgatggaagaattggttctataacagcaatcggtgcggtatc

SEQ ID NO: 831 - DNA, 456 bp, Clostridium perfringens
  ref <308>: DATABASE ACCESSION NUMBER: ATCC 13124
tagttcagcaccaagttgctaaatggggagatactgagatagttgtttacgttggatgtggagaacgtggtaacgagatgacagacgttcttaacgaattcccagaacttaaagaccctaaaactggggaaagcttaatgaagagaacagttcttattgctaatacatctaacatgccagttgctgccagagaagcatcaatatatactggtataacaatagcagagtatttcagagatatgggatactcagtatcaatcatggctgactcaacttcacgttgggcagaggctttaagagaaatgtcaggaagacttgaagaaatgccaggagacgaaggttacccagcatacttaggatcaagacttgctgattactatgaaagagctggtaaagttgtagctttaggtaaagatggaagagaaggagctgttacagctatcggagcagtatccc

SEQ ID NO: 832 - DNA, 444 bp, Clostridium tetani
  ref <308>: DATABASE ACCESSION NUMBER: ATCC 19406
ccaacttgcaaaatgggctgatgctcaaatagttgtgtacataggatgtggagaacgtggaaatgaaatgacagacgttttaaatgagttcccagaattaaaggatcctaaaaccggggaatctttaatgaaaagaactgtgttaatagcaaatacatctaatatgcctgttgcagctagagaagcatctatatatactggtataacaataggggaatattttagagatatgggatattcaatagcactaatggcagattcgacttctagatgggcagaggctctaagagaaatgtctggaagactagaggagatgccaggtgaagaaggttatccagcttatttaggatctagattagcagagttctatgaaagagcaggtaatgttatatgtttaggtcaggatggaagagaaggagcattaacagctataggagcagtttc

SEQ ID NO: 833 - DNA, 1786 bp, Streptococcus pyogenes
tgaaccaaggaaaaataataaccgtttcgggacctcttgttgtggcttctgggatgcaagaagctaatattcaagatatttgtcgtgtgggacatcttggcttagtcggagaaattattgaaatgcgtcgcgatcaagcgtctattcaggtttatgaggaaacatcagggatcggtccaggagaaccagtagtgactactggttgtcctttgtcggtcgagttaggcccgggcctgatttcagaaatgtttgacggtattcagcgaccgcttgatcgttttcaaaaagcaacggacagcgactttttaatccgtggtgtggctatcccaagtcttgatcgaaaggctaagtgggcatttattcccaagctaagtgttggtcaagaagtagttgcaggtgatattttaggaactgtgcaagaaacagctgtcattgagcaccgtatcatggttccttataaagtttcagggaccttggtggctattcatgcaggggacttcacagtaacagatacagtttatgaaattaagcaggaagacggttccatttaccaaggtagcctcatgcagacttggccagttcgtcaaagtcgccctgttgctcaaaagcttatcccagtcgaacctttggttacaggtcaacgggttattgacacctttttccctgttacaaaaggtggtgccgctgccgttcctggaccatttggggcaggaaaaacagttgtgcagcatcaaatagctaaatttgccaacgttgatattgttatttatgtcggttgtggggaacgcggcaacgagatgaccgacgttttgaatgagtttccagagttaattgacccaaatacaggccagtccattatggagcgcacggtgttaattgcaaacacctctaatatgccagtagcagcgcgtgaagcgtcgatttacacaggtattaccattgccgaatatttccgtgatatgggctattctgtggctatcatggcagactcgacatcacgttgggcagaagctctgcgcgagatgtcaggacgcctacaagaaatgcctggtgatgaaggctacccggcttacttagggagtcgtattgccgaatattatgaacgggctggtcgtgttcggaccttgggaagtcaagaacgtgagggaaccattacagccatcggcgcggtttctcctcctggaggggatatttcagagcctgtcactcaaaacacccttcggattgtcaaagttttctgggggctcgacgcgcctcttgcgcaacggcgtcacttcccagcgattaactggctgacgtcttattcattgtatcaagatgatgtaggaagctatattgaccgtaaacagcaatctaattggtccaacaaggtaactcgtgccatggctattttgcagcgtgaagccagtctagaagaaattgtacgcttggtggggcttgattcactgtctgaacaagatcgtttgaccatggctgttgcccggcaaattcgggaggattatctccagcaaaatgcctttgattcggtggatacctttacttcctttccgaaacaagaggccatgctaaccaatattttgacctttaatgaggaagccagcaaagccctttctttgggagcttattttaatgagattatggaaggcactgctcaggtacgcgatcgcatcgcacgcagcaaatttatcccagaagaaaacttagagcagattaaagggcttactcagaaggttaccaaagagattcaccacgttttagcaaagggaggaatttagatgagcgttct

SEQ ID NO: 834 - DNA, 499 bp, Babesia bovis
  strain Suarez-3
tatctcacgtaagtttttgcgcggcggttatatatcactccaggccctggctaagtacgctaatactgacgttactgtctatgtgggatgtggagagcgtggaaacgagattgcggaggtgcttaaggagttccctgagctgaagaccaaggttgatggcaaggaagtgagcattatgaaacgcacttgcttggtggccaatacttcaaacatgccagtggccgccagggaggctagtatctacactggcattaccctatgtgaatacttcagggatatgggatacaacgcctgtgtgatggcggattccaccagtcgttgggctgaggctttgcgtgagatatcaggtcgtttagctgagatgcctgctgattcaggttatcccgcctaccttgcttctaggctttcggcgttctatgagcgtgctggtacagctgagtgtattggaacaccacttcgtgaaggttcagttaccattgttggtgctgtatctccacca

SEQ ID NO: 835 - DNA, 464 bp, Cryptosporidium parvum
tttctcaagctttgagtaaatatagtaactctgatgttattatttacattggttgtggagaaagaggaaatgaaatggcagaagttcttacagaattccctgagctttatactatggttgatggaaagaaggagtcaattatgcaaagaacttgtttagtagctaatacatcaaatatgcctgtcgctgctagagaagcttccatctacactggtattacactttctgaatactttagagatatgggatgtaatgtttctatgatggcagattcaacttctcgttgggctgaagctcttagagaaatttctggtagattagctgaaatgcctgcagattcgggttacccagcatatttaggcgccagacttgcttcattctatgaaagatcaggaagagttaaatgtatgggttccccagatagagaaggtacagtaacaattgttggtgcagtttctccacct

SEQ ID NO: 836 - DNA, 446 bp, Leishmania infantum
  strain MOU
gccctctccaagtactccaactccgattgcgtcatctatgtcggctgcggcgagcgcggtaatgagatggccgaggtgctcatggagttcccgaccctgacgaccgtgatcgatggccgcgaggagtcgatcatgaagcgcacctgcctcgtggcgaacacctcgaacatgccagtcgcagcccgtgaggcctctatttacaccggcatcaccctggccgagtactaccgtgatatgggcaagcatatcgccatgatggctgactcgacgtctcgctgggccgaggcgcttcgtgagatttcgggtcgtctggcggagatgccggcggatggtggctaccccgcctacctcagcgctcgtctcgcctccttctacgagcgcgccggcctcgtcacctgcatcggcgggccgaagcgccagggctccgtcacgatcgtcggtgccgt

SEQ ID NO: 837 - DNA, 456 bp, Leishmania major
  ref <308>: DATABASE ACCESSION NUMBER: ATCC 50122
ttagtcaggccctctccaagtactccaactccgactgcgtcatctatgtcggctgcggcgagcgcggtaatgagatggctgaggtgctcatggatttcccaactctgacgaccgtgatcgatggtcgcgaggagtccatcatgaagcgcacctgcctcgtggcaaacacttcgaacatgccagtcgcagcccgcgaggcctctatttacaccggcatcaccctggccgagtactaccgtgatatgggcaagcatattgccatgatggccgactcgacatctcgctgggccgaggcgcttcgtgagatttccggtcgtctggcggagatgccagccgatggtggctaccctgcctacctcagcgctcgtctcgcctccttctacgagcgcgccggcctcgtcacctgcatcggcgggccgaagcgccagggctccgtcacgatcgtcggtgctgtgt

SEQ ID NO: 838 - DNA, 450 bp, Leishmania tarentolae
  strain MOU-2
aggccctctccaagtactccaactccgactgcgtcatctacgtcggctgcggcgagcgcggtaatgagatggccgaggtgctcatggagttcccgaccctgacgactgtgattgatggccgtgaggagtcgatcatgaagcggacctgcctcgtggccaacacctccaacatgccagtcgcagcccgtgaagcctctatttacactggtatcaccctggccgaatactaccgtgatatgggcaagcatatcgccatgatggctgactcgacgtctcgctgggcggaggcgcttcgtgagatttcgggtcgcctggcggagatgccggctgatggtgggtaccccgcctaccttagtgctcgtcttgcctccttctacgagcgtgccggcctcgtcacctgcatcggtgggccgaagcgccagggctccgtcacgatcgtcggtgccgtgt

SEQ ID NO: 839 - DNA, 437 bp, Trypanosoma brucei subsp. brucei
  strain EATRO795
gcactctcgaagtactcgaacagtgacgctgttatttacgtgggttgtggtgagcgtggcaatgagatggcggaggtgctcatggactttcccaccctcaccaccattattgatggacgtgaggagtctatcatgaagcgcacatgcctggtggcaaatacttccaatatgcctgttgctgctcgtgaggcatctatttacactggtatcaccttagctgagtattatcgggatatgggaaaacacatcgccatgatggccgattcaacctcccgctgggctgaggctttgcgtgagatttccggtcgtcttgctgaaatgcctgcagatggaggttatcccgcgtacctcagcgcccgtttggcctccttctacgagcgtgctggccgtgtgacatgcatcggtgggccgaagcgtgaagggtctgtaacaattgt

SEQ ID NO: 840 - DNA, 1052 bp, Trypanosoma cruzi
  strain MM3
tgaaggctgagcgcgagcgcggcatcacgatcgacatcgcgctctggaagttcgagtcgcccaagtctgtgttcacgatcatcgacgcccccggccaccgcgacttcatcaagaacatgatcacgggcacgtctcaggcggacgccgccgtccttgtcattgcgtcatcgcagggtgagtttgaggcgggcatctcgaaggacggccagacacgcgagcacgcgctgctcgccttcacgctcggcgtgaagcagatggttgtgtgctgcaacaagatggacgacaagtcggtgaacttcgcccaggagcgctacgatgagattgtgaaggaggtgtcggcgtacctgaagaaggttgggtacaacgtggagaaggtgcgcttcatccccatctccggctggcagggcgacaacatgattgacaagtcggaaaatatgccgtggtacaagggccccacgctgctggaggcactcgacatgctggagcccccggtgcgccccagcgacaagccgctgcgcctgccgctgcaggacgtgtacaagatcggcggtatcggcaccgtgccggtcggtcgcgtggagacgggcacgatgaagcccggcgacgtggtgacgtttgcgcccgccaacgtgacgacggaggtgaagtcgattgagatgcaccacgagcagctggccgaggccacgcccggcgacaacgtcggcttcaacgtgaagaacgtgtccgtgaaggacatccgccgtggcaacgtgtgcggcaactcgaagaacgaccccccaaaggaggcggccgacttcacggcgcaggtgatcatcctgaaccaccccggccagatcggcaacggctatgcgccggtgctcgactgccacacctgccacatcgcgtgcaagttcgccgagatcgagtccaagatcgaccgccgctccggcaaggagcttgagaagaaccccaagtcgatcaagtccggtgacgccgccatggtgcgcatggtgccgcagaagcccatgtgcgtggaggtgttcaacgactacgctcctcttggccgctttgcc

SEQ ID NO: 841 - DNA, 1061 bp, Trypanosoma cruzi
  strain CGL-1
tgaaggctgagcgcgagcgcggcatcacgatcgacatcgcgctctggaagttcgagtcgcccaagtctgtgttcacgatcatcgacgcccccggccaccgcgacttcatcaagaacatgatcacgggcacgtctcaggcggatgccgccgtccttgtcattgcgtcatcgcagggtgagtttgaggcgggcatctcgaaggacggccagacacgcgagcacgcgctgctcgccttcacgctcggcgtgaagcagatggttgtgtgctgcaacaagatggacgacaagtcggtgaactttgcccaggagcgctacgatgagattgtgaaggaggtgtcggcgtacctgaagaaggttgggtacaacgtggagaaggtgcgcttcatccccatctccggctggcagggcgacaacatgattgacaagtcggaaaatatgccgtggtacaagggccccacgctgctggaggcactcgacatgctggagcccccggtgcgccccagcgacaagccgctgcgcctgccgctgcaggatgtgtacaagatcggcggtatcggcaccgtgccggtcggtcgcgtggagacgggcacgatgaagcccggcgacgtggtgacgtttgcgcccgccaacgtgacgacggaggtgaagtcgattgagatgcaccacgagcagctggccgaggccacgcccggcgacaacgtcggcttcaacgtgaagaacgtgtccgtgaaggacatccgccgtggcaacgtgtgcggcaactcgaagaacgatcccccaaaggaggcggccgacttcacggcgcaggtgatcatcctgaaccaccccggccagatcggcaacggctatgcgccggtgcttgactgccacacctgccacatcgcgtgcaagttcgccgagatcgagtccaagatcgaccgccgctccggcaaggagcttgagaagaaccccaagtcgatcaagtccggtgacgccgccatggtgcgcatggtgccgcagaagcccatgtgcgtggaggtgttcaacgactacgctcctcttggccgctttgccgtgcgtgac

SEQ ID NO: 842 - DNA, 1062 bp, Trypanosoma cruzi
  strain PCU-1
gctgaaggctgagcgcgagcgcggcatcacgatcgacatcgcgctctggaagttcgagtcgcccaagtctgtgttcacgatcatcgacgcccccggccaccgcgacttcatcaagaacatgatcacgggcacgtctcaggcggacgccgccgtccttgtcattgcgtcatcgcagggtgagtttgaggcgggcatctcgaaggacggccagacacgcgagcacgcgctgctcgccttcacgctcggcgtgaagcagatggttgtgtgctgcaacaagatggacgacaagtcggtgaacttcgcccaggagcgctacgatgagattgtgaaggaggtgtcggcgtacctgaagaaggttgggtacaacgtggagaaggtgcgcttcatccccatctccggctggcagggcgacaacatgattgacaagtcggaaaatatgccgtggtacaagggccccacgctgctggaggcactcgacatgctggagcccccggtgcgccccagcgacaagccgctgcgcctgccgctgcaggacgtgtacaagatcggcggtatcggcaccgtgccggtcggtcgcgtggagacgggcacgatgaagcccggcgacgtggtgacgtttgcgcccgccaacgtgacgacggaggtgaagtcgattgagatgcaccacgagcagctggccgaggccacgcccggcgacaacgtcggcttcaacgtgaagaacgtgtccgtgaaggacatccgccgtggcaacgtgtgcggcaactcgaagaacgaccccccaaaggaggcggccgacttcacggcgcaggtgatcatcctgaaccaccccggccagatcggcaacggctatgcgccggtgctcgactgccacacctgccacatcgcgtgcaagttcgccgagatcgagtccaagatcgaccgccgctccggcaaggagcttgagaagaaccccaagtcgatcaagtccggtgacgccgccatggtgcgcatggtgccgcagaagcccatgtgcgtggaggtgttcaacgactacgctcctcttggccgctttgccgtgcgtga

SEQ ID NO: 843 - DNA, 1057 bp, Babesia bovis
  strain Suarez-3
tacattgacagctgcattgaccaaggtctgttcgatgggtggtcatggcgagtacactccttatgaagcaattgaccgtgctcctgaggagcgtaaacgtggtattactataaattcgacacatgttgaatatgagactaagaaccgtcattacggtcacgtggactgtccaggtcactctgattatgtgaagaacatgatatctggcgctgctcagatggatggtgccatattggttgtttcttgtgttgacggtcccatgcctcagactaaggagcacgtgttgcttgctaagcagattggtgtacctcgtttagttgtgtttttgaacaagcttgacatgttagaggactctgagctattggagttggtggagttagaggttcgtgagttattgagtgagtttggttacgacggtgacaacacgcctatcgttcgtggcagtgctataaaggcattgaacagtagttccgaggctgacattaagccaattcaggatttattggatgcgtgtgatgcctttttactgactccagaacgtaaggatgacatgccgctcttggttgctattgacgatgttcttgccattcctggcaagggtactgttgtaaccggtaggatagagcagggcaagattcgttgtggtgaccctattgaggtttgcgccggtccgaagtccggcaagaagactgtgtgtgttggtcttraratgttccgcaagagtctcagtragggtattgctggtgaccagattggtgttttgctcaagggtgtgaagcgcgacraggtagagcgcgggtttgtattgattcaacccggaagttacaaatgtcacggtgaatttgatgctgacttgtacgtgttgactacgraggaaggtgggcgcaagcatccgtttgtgtctaactaccgtcctcaggcgtttatacgtactggagacgtttgctgctcagttcatttggatragggtgttgagatggcagctcctggtgacaacgtgcgttgcaagatcaagttactttatcccatgcctgtccatgaaggtttacgatttgcg

SEQ ID NO: 844 - DNA, 943 bp, Leishmania aethiopica
  ref <308>: DATABASE ACCESSION NUMBER: ATCC 50119
cggtggcatcattgtggtggcggccaccgacggcgtcatgccgcagacacgcgagcacctcctgatctgctcgcagattgggcttccggcgctcgtagggttcatcaacaaagtggatatgacggacgaggacacgtgcgacctggtggacatggaggtgcgcgagcagctggagaaatacaagtttccggcggaggagacaccaatcgtgcgcggctcggccctcaaggccgtcgagggcgacgcgaagtacgaggagaacatcctcgaactggtgcggaagtgcgacgagtggatccccgacccgccgcgcaacacagacaagcctttccttatggccatcgagcacgtttacgagatcggcaaggacaagaagagcgtcatcgtgaccggccgcgtcgatcagggcgtgctgaagctcaacacagacgccgagctggccggcttcagcgccaagaagtcgacggtgagggtgacgggcatcgagatgtaccacaagacgctgagcgagtgcatgcccggtgactccgtcggcgtcagcattgtcggcaccggcgacacaaccagtctgtccaaggacaacgtggaacgcggcatggtaatggcggcgacgggtagcacgaacctgtacaacaaggtgaaggcgcaggtgtacgtgctgacgaaggatgagggcggccgccacaccggcttcagcccccactaccgcccgcagctcttcttccattgcgctgacgtgacagcggacatgagcttcccggaggcggagaagcaccgggaggagctgaacaagaaattcggccgcggccccgaggaggacaagaagaaagaggcggagatgaaggagttcgagagcaagctcgtctgcatgccgggcgataaccgcgagctgatcctgacgctcgcgtacccgatgcccattgaaaagggcctgaagttcacc

SEQ ID NO: 845 - DNA, 939 bp, Leishmania amazonensis
  ref <308>: DATABASE ACCESSION NUMBER: ATCC 50131
cggtggcatcattgtggtggcggccaccgacggcgtcatgccgcagacacgcgagcatctcttgatctgctcgcagattgggcttccggcgctcgtagggttcatcaacaaagtggacatgacggacgaggacacgtgcgacctggtggacatggaggtgcgtgagcagctggagaaatacaagtttccggcggaagagacgcccatcgtgcgcggctcggccctcaaagccgtcgagggcgacgcgaagtacgaggagaacatcctcgaactggtgcggaagtgcgacgaatggatccccgacccgccgcgcaacacagacaagcctttccttatggccattgagcacgtttacgagatcggcaaggacaagaagagcgtcatcgtgaccggccgcgtcgatcagggcgtgctgaagctcaacacagacgccgagctggccggcttcagcgccaagaagtcgacggtgagggtgacgggcatcgagatgtaccacaagacgctgagtgagtgcatgcccggtgactccgtcggcgtcagcattgtcggcaccggcgacacgatcagtctctccaaggacaacgttgaacgcggcatggtaatggcggcaacgggtagcacgaacctgtacaacaaggtgaaggcgcaggtgtacgtgctgacgaaggatgagggcggccgccacactggcttcagcccccactaccgcccgcagctcttcttccattgtgctgacgtgacggcggacatgagcttcccggaggcggagaagcaccgcgaggagctcaacaagaaattcggccgcggccccgaggaggacaagcagaaggaggcggagatgaaagagttcgagagcaagctcgtctgcatgccgggcgacaaccgcgagctgatcctgacgctggcgtacccgatgcccattgacaagggtctgaagtt

SEQ ID NO: 846 - DNA, 945 bp, Leishmania donovani
  ref <308>: DATABASE ACCESSION NUMBER: ATCC 50212
cattgtggtggcggccaccgacggcgtcatgccgcagacacgcgagcacctcctgatctgctcgcagatcgggcttccggcgctcgtagggttcatcaacaaggtggacatgacggacgaggacacgtgcgacctggtggacatggagctgcgcgagcagctggagaaatacaagtttccggcggaggagacgccaatcgtgcgcggctcagccctcaaagccgtcgagggcgatgcgaagtacgaggagaacattctcgaactggtgcggaagtgtgacgagtggatccctgacccgccgcgcaacacagacaagcctttccttatggccatcgagcacgtttacgagatcggcaaggacaagaagagcgttgtcgtgaccggccgcgtcgatcagggcattctgaagctcaacacagacgccgagctggccggcttcagctccaagaagtcgacggtgagggtgacgggcatcgagatgtaccacaagacgctgagcgagtgcatgcctggtgactccgtcggcgtcagcattgtcgggaccggcgacacgaccagtctatccaagggcaacgtggaacgcggcatggtgatggcggcgacgggtagcacgaacctgtacaacaaggtgaaggcgcaggtgtacgtgctgacgaaggatgagggcggccgccacactggctttagtcctcactaccgcccgcagctcttcttccattgtgctgacgtgacggcggacatgagcttcccggaggcggagaagcaccgcgaagagctcaacaagaaattcggccgcggccccgaggaggacaagaagaaagaggcagcgatgaaggagttcgagagcaagctcgtctgcatgccgggcgataaccgcgagctgatcctgacgctggcgtacccgatgcccattgaaaagggtctgaagttcaccatccgtgaggg

SEQ ID NO: 847 - DNA, 939 bp, Leishmania infantum
  strain MOU
ggcatcattgtggtggcggccaccgacggcgtcatgccgcagacacgcgagcacctcctgatctgctcgcagatcgggcttccggcgctcgtagggttcatcaacaaggtggacatgacggacgaggacacgtgcgacctggtggacatggagctgcgcgagcagctggagaaatacaagtttccggcggaggagacgccaatcgtgcgcggctcagccctcaaagccgtcgagggcgatgcgaagtacgaggagaacattctcgaactggtgcggaagtgtgacgagtggatccctgacccgccgcgcaacacagacaagcctttccttatggccatcgagcacgtttacgagatcggcaaggacaagaagagcgttgtcgtgaccggccgcgtcgatcagggcgttctgaagctcaacacagacgccgagctggccggcttcagctccaagaagtcgacggtgagggtgacgggcatcgagatgtaccacaagacgctgagcgagtgcatgcctggtgactccgtcggcgtcagcattgtcggcaccggcgacacgaccagtctatccaagggcaacgtggaacgcggcatggtgatggcggcgacgggtagcacgaacctgtacaacaaggtgaaggcgcaggtgtacgtgctgacgaaggatgagggcggccgccacactggctttagtcctcactaccgcccgcagctcttcttccattgtgctgacgtgacggcggacatgagcttcccggaggcggagaagcaccgcgaagagctcaacaagaaattcggccgcggccccgaggaggacaagaagaaagaggcagcgatgaaggagttcgagagcaagctcgtctgcatgccgggcgataaccgcgagctgatcctgacgctggcgtacccgatgcccattgaaaagggtctgaagttcacc

SEQ ID NO: 848 - DNA, 933 bp, Leishmania enriettii
  ref <308>: DATABASE ACCESSION NUMBER: ATCC 50120
caccgacggcgtcatgccgcagacacgggagcacctgctcatctgctcgcagatcgggctgccggcgcttgtagggttcatcaataaagttgacatgacggacgaggatacgtgcgacctcgtggacatggaggtgcgggaacagctggagaagtacaagtttccggccgaggagacgcccatcgtacgtggctcggccctcaaggccctcgagggggatgcgcaatacgaggggagtattctcgagctggtgcgaaagtgcgacgagtggatccccgacccgccgcgcaacaccgaaaagcctttcctcatggctatcgagcacgtttacgagctcggcaaagacaagaagagcgtcatcgttaccggccgcgtcgatcaaggtgtgctgaagctcaacacagacgccgagctggccggcttcagcgccaagaaggcgacagtcaaagtgacgggcatcgagatgtatcacaagacactcaatgagtgcatgcccggcgactctgtcggtgtcagcatcgtcggtaccggtgacacgaccagcttatccaaggataatgttgagcgcggtatggtaatggcggcaacgggtagcacgaacctgtacaacaagctgaaggcgcaggtttacgtgctgacaaaggaggagggtggccgccacaccgggttcagcccccactaccgcccgcagctcttcttccactgcgctgacgtgaccgcagacatgagcttcccggaggcggagaagtaccgcgaggagctcaacaagaagttcggccgtggccctgaggaggacaagaagaaagaggcggagatgaaggagttcgaaagcaaacttgtctgcatgccaggcgataaccgcgagctgatcctaactctggcgtacccgatgcccatcgacaagggcctgaagttcaccatccgtgagggcgg

SEQ ID NO: 849 - DNA, 943 bp, Leishmania gerbilli
  ref <308>: DATABASE ACCESSION NUMBER: ATCC 50121
cggtggcatcattgtggtggcggccaccgacggcgtcatgccgcagacacgcgagcacctcctgatctgctcgcagattgggcttccggcgctcgtagggttcatcaacaaagtggacatgacggacgaggacacgtgcgacctggtggacatggaggtgcgcgagcagctggagaaatacaagtttccggcggaggagacaccaatcgtgcgcggctcggccctcaaggccgtcgagggcgacgcgaagtacgaggagaacatcctcgaactggtgcggaagtgcgacgagtggatccccgacccgccgcgcaacacagacaagcctttccttatggccatcgagcacgtttacgagatcggcaaggacaagaagagcgtcatcgtgaccggccgcgtcgatcagggcgtgctgaagctcaacacggacgccgagctggccggcttcagcgccaagaagtcgacggtgagggtgacgggcattgagatgtaccacaagacgctgagcgagtgcatgcccggtgactccgtcggcgtcagcattgtcggcaccggcgacacgaccagtctgtccaaggacaacgtggaacgcggcatggtaatggcggcgacgggtagcacgaacctgtacaacaaggtgaaggcgcaggtgtacgtgctgacgaaggatgagggcggccgccacactggcttcagcccccactaccgcccgcagctcttcttccattgcgctgacgtgacagcggacatgagcttcccggaggcggagaagcaccgcgaggagctcaacaagaaattcggccgcggccccgaggaggacaagaagaaagaggcggagatgaaggagttcgagagcaagctcgtctgcatgccgggcgataaccgcgagctgatcctgacgctggcgtacccgatgcccattgaaaagggtctgaagttcacc

SEQ ID NO: 850 - DNA, 918 bp, Leishmania major
  ref <308>: DATABASE ACCESSION NUMBER: ATCC 50122
ggcatcattgtggtggcggccaccgacggcgtcatgccgcagacacgcgaacacctcctgatctgctcgcaaattggccttccggcgctcgtagggttcatcaacaaagtggacatgacggacgaggacacgtgtgacctggtggacatggaggtgcgcgagcagctggagaaatacaagtttccggcggaggagacaccaatcgtgcgcggctcggccctcaaggccgtcgagggcgacgcgaagtacgaggagaacatcctcgaactggtgcggaagtgcgacgagtggatccccgacccgccgcgcaacacagacaagcctttccttatggccatcgagcacgtttacgagatcggcaaggacaagaagagcgtcatcgtgaccggccgcgtcgatcagggcgtgctgaagctcaacacagacgccgagctggccggcttcagcgccaagaagtcgacggtgagggtgacgggcattgaaatgtaccacaagacgctgagcgagtgcatgcccggtgactccgtcggcgtcagcattgtcggcaccggcgacacgaccagtctgtccaaggacaacgtggagcgcggcatggtaatggcggcgacgggtagcacgaacctgtacaacaaggtgaaggcgcaggtgtacgtgctgacgaaggatgagggcggccgccacactggcttcagcccccactaccgcccgcagctcttcttccattgcgctgacgtgacagcggacatgagcttcccggaggcggagaagcaccgcgaggagctcaacaagaaattcggccgcggccccgaggaggacaagaagaaagaggcggagatgaaggagttcgagagcaagctcgtctgcatgccgggcgataaccgcgagctgatcctgacgctggcgtacccgatgcccatt

SEQ ID NO: 851 - DNA, 939 bp, Leishmania mexicana
  ref <308>: DATABASE ACCESSION NUMBER: ATCC 50156
cggtggcatcattgtggtggcggccaccgacggcgtcatgccgcagacacgcgagcatctcctgatctgctcgcagattgggcttccggcgctcgtagggttcatcaacaaagtggacatgacggacgaggacacgtgcgacctggtggacatggaggtgcgtgagcagctggagaaatacaagtttccggcggaagagacgcccatcgtgcgcggctcggccctcaaggccgtcgagggcgacgcgaagtacgaggagaacatcctcgaactggtgcggaagtgcgacgaatggatccccgacccgccgcgcaacacagacaagcctttccttatggccattgagcacgtttacgagatcggcaaggacaagaagagcgtcatcgtgaccggccgcgtcgatcagggcgtgctgaagctcaacacagacgccgagctggccggcttcagcgtcaagaagtcgacggtgagggtgacgggcatcgagatgtaccacaagacgctgagtgagtgcatgcccggtgactccgtcggcgtcagcattgtcggcaccggcgacacgatcagtctctccaaggacaacgttgaacgcggcatggtaatggcggcaacgggtagcacgaacctgtacaacaaggtgaaggcgcaggtgtacgtgctgacgaaggatgagggcggccgccacactggcttcagcccccactaccgcccgcagctcttcttccattgtgctgacgtgacggcggacatgagcttcccggaggcggagaagcaccgcgaggagctcaacaagaaattcggccgcggccccgaggaggacaagcagaaggaggcggagatgaaagagttcgagagcaagctcgtctgcatgccgggcgacaaccgcgagctgatcctgacgctggcgtacccgatgcccattgagaagggtctgaagtt

SEQ ID NO: 852 - DNA, 912 bp, Leishmania tarentolae
  strain MOU-2
tcattgtggtggccgccaccgacggcgtcatgccgcaaacacgggagcaccttttgatctgctcgcagatcgggctgccggcgctcgtagggttcatcaacaaagtggacatgacagacgaagacacgtgcgacctggtagacctggaggtgcgtgagcagctggagaagtacaagtttccggcagaggaaacaccaatcgtgcgtggctcggccctcaaggccgttgagggcgatgcaaagtacgaggagaacatcctcgaactggtgcggaagtgcgacgagtggatcccagacccgccacgcaatacggacaagcctttccttatggccattgaacacgtgtacgagatcggcaaggataggaaaagcgtcatcgtaaccggccgcgtcgatcaaggtgtgctgaagctgaacacagacgccgagctggccggcttcagcgccaagaagtcgacggtgaaagtgacgggcattgagatgtaccacaagacactgacagagtgcatgcccggcgactctgtcggcgtcagcattgtgggcactggygacacgaccagcctctctaaggacaatgttgagcgtggcatggtactggccgctacgggtagcacgaacctgtacaacaaagtaaaggcgcaggtgtatgtactcacgaaggatgagggcggccgccacaccggcttcagcccccactaccgtccgcagctcttcttccactgcgctgacgtaacggcggacatgagcttcccggaggcggagaagcaccgcgaggaactcaataagaaattcggccgcggccccgaggaggacaagaaaaaggaggcggagatgaaggagttcgagagcaagctggtctgcatgccaggcgataaccgcgagctgatcctgacattggcgtacccgatgccta

SEQ ID NO: 853 - DNA, 936 bp, Trypanosoma cruzi
  strain MM3
attcttgtggtggcagctaacgacggatgcatgccgcagacgcgtgagcacctgcttatttgttcgcagattggccttcctgctcttgtatgctttatcaataagtgtgacatgatgcaagggcaggaggaaatgattgaacttgttgaaatggaggtacgtgaacttttggagaagtacaagttccctgcggaggagacgccatttgtgcgggggtctgcggtgaaggcattggagggtgatgctgaaaatgaaggaaagattttggagcttgtaaaaaaatgtgatgaatggattcccgacccaccgcgtgccattgaaaaaccgttccttatggccattgagcacgtttttgaggttggaaaggataagaaggccgttgttgtgagcgggcgtgtggaccaggggcagttgaaggtcggcgcagatgcagaactttccgggtttagcgcaaagaagctgacggtgaaggttgctagcatcgaaatgtaccataaaattctggaggattgcatgcctggtgactctgttggcgcgaagatcgttggcagcggtgaaacagtgaacctgtcgaaggaaaatgtggaacgcggcatggtactctccgcaccaggtgcaacgacactgttcaacaaggtccgcgcgcaggtgtacgtgttgacaaaggaagaaggcggtcgtcacacagcctttagtcctcactatcgtccgcagcttttcttccactgtgctgatgtcacggcagatattaacttcccggaaagcgagaagcttgcaggggagctgaacaaaaagtatggccgtgatgcggcggaacagaagaagaaggaggcagaactgaaagagtttgaaaagacgcttgtctgcatgcctggtgataaccgcgaactcctgctcacccttgcctatccaatgccaatggaaaagggactcaag

SEQ ID NO: 854 - DNA, 934 bp, Trypanosoma cruzi
  strain PCU-1
cggcattcttgtggtggcagctaacgacggatgcatgccgcagacgcgtgagcacctgcttatttgttcgcagattggccttcctgctcttgtatgctttatcaataagtgtgacatgatgcaagggcaggaggaaatgattgagcttgttgaaatggaggtacgtgaacttttggagaagtacaagttccctgcggaggagacgccatttgtgcgggggtctgcggtgaaggcattggagggtgatgctgaaaatgaaggaaagattttggagcttgtaaaaaaatgtgatgaatggattcccgacccaccgcgtgccattgaaaaaccgttccttatggccattgagcacgtttttgaggttggaaaggataagaaggccgttgttgtgagcgggcgtgtggaccaggggcagttgaaggtcggcgcagatgcagaactttccgggtttagtgcaaagaagctgacggtgaaggttgctagcatcgaaatgtaccataaaattctggaggattgcatgcctggtgactctattggcgcgaagatcgttggcagcggtgaaacagtgaacctgtcgaaggaaaatgtggaacgcggcatggtactctccgcaccaggtgcaacgacactgttcaacagggtccgcgcgcaggtgtacgtgttgacaaaggaagaaggcggtcgtcacacagcctttagtcctcactatcgtccgcagcttttcttccactgtgctgatgtcacggcggatattaacttcccggaaagcgagaagcttgcaggggagctgaacaaaaagtatggccgtgacgcggcggaacagaagaagaaggaggcagaactgaaagagtttgaaaagacgcttgtctgcatgcctggtgataaccgcgaactcctgctcacccttgcctatccaatgccaatggaaaaggga

SEQ ID NO: 855 - DNA, 937 bp, Trypanosoma cruzi
  strain CGL-1
tggcggcattcttgtggtggcagctaacgacggatgcatgccgcagacgcgtgagcacctgcttatttgttcgcagattggccttcctgctcttgtatgctttatcaataagtgtgacatgatgcaagggcaggaggaaatgattgaacttgttgaaatggaggtacgtgaacttttggagaagtacaagttccctgcggaggagacgccatttgtgcgggggtctgcggtgaaggcattggagggtgatgctgaaaatgaaggaaagattttggagcttgtaaaaaaatgtgatgaatggattcccgacccaccgcgtgccattgaaaaaccgttccttatggccattgagcacgtttttgaggttggaaaggataagaaggccgttgttgtgagcgggcgtgtggaccaggggcagttgaaggtcggcgcagatgcagaactttccgggtttagcgcaaagaagctgacggtgaaggttgctagcatcgaaatgtaccataaaattctggaggattgcatgcctggtgactctgttggcgcgaagatcgttggcagcggtgaaacagtgaacctgtcgaaggaaaatgtggaacgcggcatggtactctccgcaccaggtgcaacgacactgttcaacaaggtccgcgcgcaggtgtacgtgttgacaaaggaagaaggcggtcgtcacacagcctttagtcctcactatcgtccgcagcttttcttccactgtgctgatgtcacggcagatattaacttcccggaaagcgagaagcttgcaggggagctgaacaaaaagtatggccgtgatgcggcggaacagaagaagaaggaggcagaactgaaagagtttgaaaagacgcttgtctgcatgcctggtgataaccgcgaactcctgctcacccttgcctatccaatgccaatggaaaaggga

SEQ ID NO: 856 - DNA, 888 bp, Babesia bigemina
  strain Suarez-2
cttattatggagctgatcaacaacgtcgcgaagaagcacggtggtttctccgtgttcgccggcgtcggcgagcgcaccagggagggcaacgagctgtaccacgagatgatggagaccggcgtcatcaagcgccgccagctggatgacggcacgttcgacttctccggctccaaggccgcgctggtgtacggccagatgaacgagccgccaggtgccagggcgcgtgttgccctcactggcctgacggtggccgagtacttccgtgatgaggacggccaggacgtgctgctcttcatcgacaacatctaccgtttcacccaggctggttctgaggtgagtgcccttttggggcgcatcccgtccgccgtcggttaccagccgaccctcgccaccgaccttggcgcgctgcaggagcgtatcacgacgaccaacaagggctccatcacctccgtgcaggccgtctacgtgccggccgacgatatcaccgacccggcgcctgcgaccaccttcacccatctggacgcgaccactgtgctctcccgttccatcgccgagctgggtatctaccccgccgtcgacccgctcgactccacctcgcgtatgctgtccgcgaacatcgtcggcgaggagcagtacaacgtggcgcgtggcgtgcagaaaatactgcaggactacaaatcgctgcaggatatcatcgccatcctgggtatggacgagctgtctgagcaggacaagttcgtcgtcgcgcgtgcgcgcaaggttcagcgtttcctatcccagcccttccaggtggctgaggtattcaccggcaagcccggacgtttcgtcgagctgcaggacaccatcagcggcgtcaaggagattttggacggcgagtgcgacgacatg

SEQ ID NO: 857 - DNA, 884 bp, Babesia bovis
  strain Suarez-3
tgattatggaattgatcaacaatgtcgccaagaaacacggtgggttctccgtgttcgctggtgttggtgaacgtacgagggaaggtaacgaactgtaccatgaaatgatggaaacgggtgtcatcaagcgccgtcaactggaagacggaacatttgacttctcgggctctaaagctgctttggtgtacggacaaatgaacgaaccaccaggtgctagagcccgtgttgcactcacgggattgaccgttgccgagtatttccgtgatgaagaggggcaggatgtgctactcttcatcgataacatctaccgtttcacccaggccggttccgaagtgagtgcgctgttaggaagaattccatccgccgtgggttatcaacctacattggccactgatctcggagcactccaggaacgcattactacaaccaacaagggttcgattacatcagtccaggcagtatacgtcccagccgatgatatcactgatcccgctccagctaccactttctcgcacttggatgccactacagtgctttctcgttcaattgcggagttgggtatttaccctgcggtcgacccgcttgactcaacgtcacgtatgctgtcggccaacattgtaggacaggaacagtacgatgccgcacgtggtgtacagaaaattttacaggactacaaatcactgcaggatatcattgccattctgggtatggacgagctgtctgagcaggacaagttcgttgtagcacgcgcccgtaaggtacagcgtttcctgtctcagccgttccaagtggctgaggtgttcaccggcaagcctgggaggttcgttgaactacaggataccatcagcggtgtcaaggaaatctggaaggtgagtgtgacgata

SEQ ID NO: 858 - DNA, 871 bp, Babesia microtti
  strain Persing-1
tggaactgattaataatgtggccaaaaagcatggcggttactctgtttttgcaggtgtaggtgaaaggacgagggagggtaatgaattgtaccatgaaatgatggagacaggtgttataaagaaaaaggcactaggtggtgggaagtttgatttcagtggatctaaagcagcgctggtctatggacaaatgaacgagccacctggggcccgtgctagagtggcactaactggattaacagtcgcagaatatttccgtgacgaacaaggacaagacgtgttgttgtttattgataatatttaccgatttactcaggcagggtctgaggtttcagccttgctaggccgtataccttcagctgtgggataccagcctacattggcaacagatcttggctgtttacaagaacgaattactacgaccaaatctggttcaatcaccagtgtacaagctgtgtatgtgccagcagatgatattactgatccagcgcctgccacaacttttactcacttggacgctactactgtacttagcaggccaattgctgaactcggtatttatccagcggtagacccgttggattcaacaagccgtatgctaagcgcgaacattgtgggaaatgaacactatagtgtagcccgttccgtgcagaagatactgcaagattacaaatcgcttcaggacattattgccattttgggtatggatgaactgtcggaacaagacaaaaatatagtagcccgagcaaggaagatgcaaaggttcttatcacagccattccaagtggcggaagtttttactggtaaaccgggaagatttgtggaattggaagatacaattgccggggcacgagatataattgcgggtaattg

SEQ ID NO: 859 - DNA, 1255 bp, Leishmania guyanensis
  ref <308>: DATABASE ACCESSION NUMBER: ATCC 50126
tgacggcgctggacgtgacggaggacctcggccgcgatgagccgctgacgctggagatcgtgcagcacttggatgcgaacaccggccgctgcattgcgatgcagacgacggacctgctgaagctgaagtcgaaggttgtgtcgaccggcggcaacatctccgtgccggtgggccgcgagacactgggccgcatcttcaacgtgctgggcgacgcgattgaccaccgcggccccgtgtgcgagaagatgcgcatggcgatccacgccgaggcgccgaagctggcggaccaggctgcggaggacacgatcctgacgaccggcatcaaggtgatcgacctgattctgccctactgcaagggcggcaagatcggcctgttcggcggtgccggtgtgggcaagactgtgatcatcatggagctgatcaacaacgtcgcgaaggggcacggcggcttctccgtgttcgccggcgttggcgagcgcacgcgcgagggcacggacctgtacctggagatgatgcagtcaaaggtgattgacctgaagggcgagtcgaagtgcgtgcttgtgtacgggcagatgaacgagcccccgggtgcgcgcgcgcgcgttgcgcagtctgcgctgacgatggccgagtacttccgcgacgtggagggccagaacgtgctgctgttcatcgacaacatcttccgcttcacgcaggcgaactccgaggtgtctgcgctgctgggccgcatcccggccgccgtgggttaccagccgacgcttgcggaggatcttggcatgctgcaggagcgcattacgtcgacgacgaagggatcgattacgtctgtgcaggctgtgtacgtgcctgcggatgatatcacggaccccgcgcccgcgacgacgttctcgcacctggacgcgacgactgtgctggaccgcgcggtggcggagtcgggcatctaccctgccgtgaacccgctggagtgcgcgtcgcgcatcatggaccccgatgtgatcgacgtggaccattacaacgttgcacaggatatcgtccagatgctgaccaagtacaaggagctgcaggacatcattgcggtgcttggcatcgacgagctgagcgaggaggacaaggtcgtggtggaccgcgcgcgcaaggtgacgcggttcctgtcgcagccgttccaggttgcggaggtgttcaccggcatgacgggccactacgtgcagctgagcgacacggtggagtcgttctctggcctgctgatggggtcgta

SEQ ID NO: 860 - DNA, 1222 bp, Leishmania mexicana
  ref <308>: DATABASE ACCESSION NUMBER: ATCC 50156
ctcggagggcgtcccgcccgtgctgacggcgctggatgtgacggaggaccttggccgcgatgagccgctgacgctggagatcgtgcagcacctggacgcgaacaccggccgctgcattgcgatgcagacgacggacctgctgaagctgaagtcgaaggttgtgtcgaccggcggcaacatctctgtgccggtgggccgtgagacgctgggccgcatcttcaacgtgctgggcgacgcgatcgaccagcgcggccccgtgggtgagaagatgcgcatggcgatccacgccgaggccccgaagctggcggatcaggccgcggaggacacgatcctgacgaccggcatcaaggtgatcgacctgattctgccctactgcaagggtggcaagatcggcctgtttggcggcgccggtgtgggcaagaccgtgatcatcatggagctgattaacaacgtcgcgaagggccacggtggtttctcggtgtttgccggcgttggcgagcgcacgcgcgagggcacggacctgtacctggagatgatgcagtcgaaggtgattgacctgaagggcgagtcgaagtgcgtgcttgtgtacgggcagatgaacgagcccccgggtgcgcgcgcgcgcgttgcgcagtctgcgctgacgatggcggagtacttccgagacgtggagggccagaatgtgctgctgttcatcgacaacatcttccgcttcacgcaggcgaactccgaggtctctgcgctgctgggccgcattccggccgccgtgggctaccagccgacgcttgcggaggatcttggtatgctgcaggagcgcatcacgtcgacgacgaaggggtcgatcacgtccgtgcaggccgtgtacgtgcctgcggatgatatcacggatccggcgcccgcgacgacgttctcgcacctggacgcgacgactgtgctggaccgcgcggtggcggagtcggggatctaccctgccgtgaacccgctggagtgcgcgtcgcgtatcatggaccccgatgtgatcgacgtggaccactacaacgttgcgcaggatatcgtgcagatgctgaccaagtacaaggagctgcaggatatcattgcggtgcttggtatcgacgagctgagcgaggaggacaaggtcgtggtggaccgcgcgcgcaaggtgacccggttcctgtcgcagccgttccaggttgcggaggtgttcacgggcatgacgggccac

SEQ ID NO: 861 - DNA, 1246 bp, Leishmania tropica
  ref <308>: DATABASE ACCESSION NUMBER: ATCC 50129
ccgtgctgacggcgctggatgtgacggaggaccttggccgcgatgagccgctgacgctggagatcgtgcagcacttggacgcgaacaccggccgctgcattgcgatgcagacgacggacctgctgaagctgaagtcgaaggttgtgtcgaccggcggcaacatctctgtgccggtgggccgtgagacgctgggccgcatcttcaacgttctgggcgacgcgatcgaccagcgcggccccgtgggcgagaagatgcgcatggcgatccacgccgaggccccgaagctggcggatcaggccgcggaggacacgatcctgacgaccggcatcaaggtgatcgacctgattctgccctactgcaagggtggcaagatcggcctgttcggcggtgccggtgtgggcaagactgtgatcatcatggagctgatcaacaacgtcgcgaagggccacggtggtttctccgtgtttgccggcgttggcgagcgcacgcgcgagggcacggacctgtacctggagatgatgcagtcgaaggtgattgacctgaagggcgagtcgaagtgcgtgcttgtgtacgggcagatgaacgagcccccgggtgcgcgcgcgcgcgttgcgcagtctgcgctgacgatggcggagtacttccgcgacgtggagggccagaacgtgctgctgttcatcgacaacatcttccgcttcacgcaggcgaactccgaggtgtctgcgctgctgggccgcattccggccgccgtgggctaccagccgacgcttgcggaggatcttggtatgctgcaggagcgcatcacgtcgacaacgaaggggtcgatcacgtccgtgcaggccgtgtacgtgccagcggatgatatcacggatcccgcgcccgcgacgacgttctcgcacctggacgcgacgactgtgctggaccgcgcggtggcggagtcgggcatctaccctgccgtgaacccgctggagtgcgcgtcgcgtatcatggaccccgatgtgatcgatgtggaccactacaacgttgcgcaggatatcgtgcagatgctgaccaagtacaaggagctgcaggatatcattgcggtgcttggcatcgacgagctgagcgaggaagacaaggttgttgtggaccgcgcgcgcaaggtgacccggttcctgtcgcagccgttccaggttgcggaggtgttcacgggcatgacgggccactacgtgcagctggtcgacacggtggagtcgttctctggcct

SEQ ID NO: 862 - DNA, 1265 bp, Leishmania tropica
  ref <308>: DATABASE ACCESSION NUMBER: ATCC 30815
ggcgtgccgcccgtgctgacggcgctggatgtgacggaggaccttggccgcgatgagccgctgacgctggagatcgtgcagcacttggacgcgaacacgggccgctgcattgcgatgcagacgacggacctgctgaagctgaagtcgaaggtcgtgtcgaccggcggcaacatctctgtgccggtgggccgtgagacgctgggccgcatcttcaaygttctgggcgacgcgatcgaccagcgcggccccgtgggcgagaagatgcgcatggcgatccacgccgaggccccgaagctggcggatcaggccgcggaggacacgatcctgacgaccggcatcaaggtgatcgacctgattctgccctactgcaagggtggcaagatcggcctgttcggcggtgccggtgtgggcaagactgtgatcatcatggagctgatcaacaacgtcgcgaagggccacggcggtttctccgtgtttgccggcgttggcgagcgcacgcgcgagggcacggacctgtacctggagatgatgcagtcgaaggtgattgacctgaagggcgagtcgaagtgygtgcttgtgtatgggcagatgaacgagcccccgggtgcgcgcgcgcgcgttgcgcagtctgcgctgacgatggcggagtacttccgcgacgtggagggccagaacgtgctgctgttcatcgacaacatcttccgcttcacgcaggcgaactccgaggtgtctgcgctgctgggccgcattccggccgccgtgggctaccagccgacgcttgcggaggatcttggtatgctgcaggagcgcatcacgtcgacaacgaaggggtcgatcacgtccgtgcaggccgtgtacgtgccagcggatgatatcacggatcccgcgcccgcgacgacgttctcgcacctggacgcgacgactgtgctggaccgcgcggtggcggagtcgggcatctaccctgccgtgaacccgctggagtgcgcgtcgcgtatcatggaccctgatgtgatcgatgtggaccactacaacgttgcgcaggatatcgtgcagatgctgaccaagtacaaggagctgcaggatatcattgcggtgcttggcatcgacgagctgagcgaggaagacaaggttgttgtggaccgcgcgcgcaaggtgacccggttcctgtcgcagccgttccaggttgcggaggtgttcacgggcatgacgggccactacgtgcagctggtcgacacggtggagtcgttctctggcctgctgatggg

SEQ ID NO: 863 - DNA, 1191 bp, Bordetella pertussis
atggcaaaaggcaagtttgaacgtaccaagccgcacgtgaacgtgggtacgattggtcacgttgaccacggcaaaacgacgttgacggcggcgatcacgacggtgctgtcgaacaagttcggcggcgaggctcgcggctacgaccagattgacgcggcgccggaagagaaggcgcgtgggatcacgatcaacacctcgcacgttgagtacgagacggagacgcgtcactacgcgcacgttgattgcccgggtcacgctgactacgtgaagaacatgatcacgggtgctgcgcagatggacggcgcgatcctggtggtgtcggccgcagacggcccgatgccgcagacgcgcgagcacattttgctgtcgcgccaggttggcgtgccgtacatcatcgtgttcctgaacaaggcggacatggttgatgacgcggagctgctcgagctggtggagatggaagtccgcgaactgctgagcaagtacgatttcccgggcgatgacacgccgatcgtgaatggtgcggccaagctggcgctggaaagcgacaacggcgacctgggcgagcaggcgattctgtcgctggcgcaagcgctggacacgtacattccgacgccggagcgcgcggtcgacggtgcgttcctgatgccggtggaagacgtgttctcgatctcgggccgtggcacggtggtgactggccgtatcgagcgcggcgtggtgaaggttggcgaggaaatcgaaatcgtgggcatcaagccgacggtgaagacgacctgcacgggcgtggagatgttccgcaagctgctggaccagggccaggcgggcgacaacgtgggtatcttgctgcgcggcaccaagcgtgaagacgtcgagcgtggccaggtgctggccaagccgggttcgatcaacccgcacacggacttcacggccgaggtgtacattctgtccaaggaagagggtggccgtcacacgccgttcttcaacggctatcgtccgcagttctacttccgcacgacggacgtgaccggcacgatcgacctgccggcggacaaggaaatggtgctgccgggcgacaacgtgtcgatgaccgtcaagctgctggccccgatcgccatggaagaaggtctgcgtttcgccatccgtgaaggcggtcgtaccgtcggtgccggcgtcgtcgccaagatcatcaagtaa

SEQ ID NO: 864 - DNA, 1350 bp, Trypanosoma brucei
  strain LVH/75/USAMRU-K/18
atgggaaaggaaaaggtgcacatgaatcttgtggtggtgggccacgtcgatgccggtaaatccactgcaacgggtcacttgatctacaagtgcggtggtattgacaaacgtacgatcgagaagttcgagaaagaagctgccgacattggtaaggcctcattcaagtacgcatgggtgctggacaagctgaaggctgagcgcgaacgtggtatcacgatcgacattgcactgtggaaattcgagtcacccaagtctgtcttcactattattgatgctcctgggcaccgtgacttcatcaagaacatgatcaccggcacatcgcaagccgacgcagccatcctcatcattgcctctgcgcagggtgagttcgaggctggtatctccaaggatggacagacccgcgagcacgcgttgctggccttcactttgggtgtgaagcagatggttgtgtgctgcaacaaaatggacgacaagactgtgaactacggacaggagcggtatgacgagattgtgaaggaggtgtctgcttacatcaagaaggttgggtacaacgtggagaaggtgcgcttcgtccccatctccggatggcagggcgacaacatgattgagaaatccgagaagatgccatggtacaagggtccaacgctcctggaggcactagacatgctggagccaccagtgcgtccgagcgacaagcccctgcgtctgccactgcagacgtgtacaaagatcggtggtattggcaccgtgcccgttggtcgtgtggagaccggcgtgatgaagcctggtgatgtggtgacgtttgcccccgccaacgtgacgaccgaggtgaaatcgatcgagatgcaccacgagcagctcgctgaggcgacccccggtgacaacgtcggctttaacgtgaagaacgtttctgtaaaggacatccgccgtggcaacgtctgcggtaacaccaagaacgaccccccaaaggaggccgccgacttcacggcacaggtgatcatcctgaaccaccccggacagattggaaacggttatgcgcccgtgctggactgccacacatcgcacattgcctgcaagttcgcggagatcgagtcgaagatcgaccgtcgctctggcaaggagctggagaaggctcccaagtcgatcaagtctggcgacgccgcgatcgtgcgcatggtgccgcagaagcctatgtgcgtggaggtcttcaacgactacgcgccactcggccgctttgccgtgcgtgacatgcgccagaccgtcgctgtcggtatcatcaaggccgtgaccaagaaggacggttctggtggtaaggtgacgaaggctgcggtgaaggcttcgaagaaataa

SEQ ID NO: 865 - DNA, 1052 bp, Cryptosporidium parvum
aagctcaaggctgagagagaaagaggtattaccatcgatattgctttatggcaattcgaaaccccaaaataccactacactgtcattgatgccccaggtcacagagatttcatcaagaatatgattactggtacctctcaagctgatgttgctttattggttgtcccagccgatcgtttcgaaggtgccttctccaaggaaggtcaaaccagagaacatgctttattggccttcactttgggtgtcagacaaatgattgtcggtattaacaagatggatacctgtgaatacaagcaatctcgttttgatgaaatcttcaacgaagttgatggttacctcaagaaggttggttacaacaccgagaagatcccattcgttgccatttctggtttcgttggtgataatatggttgagagatctgacaagatgccatggtataagggtaagaccttagtcgaagccctcgacactatggaaccaccaaagagaccaactgacaagccactccgtctcccattacaagatgtttacaagataggtggtgtaggtactgtcccagtcggtcgtgttgagactggtatcatcagaccaggtatgaatgttaccttcgctccagctggtgttaccactgaagttaagtcagtagaaatgcaccatgagcagatgccagaggccgtcccaggtgacaacgttggtttcaatgttaagaacgtctccatcaaggatatcaagagaggtttcgttgcttctgatgccaagaatgacccagctaagggctgtgaagacttcactgctcaagttatcgtcctcaaccacccaggtgaaatcaagaacggttactctccagtcgttgactgtcacaccgctcacatttcctgcaaattccagactatcactgctaagatggacaagagatctggtaaggttttggaagaaaacccaaagcttatcaagtctggtgatgctgctttggttgttatgcaacctttgaagccactttgtgttgaggccttcactgactacccacctctaggtcgtttcgctgtccgtga

SEQ ID NO: 866 - DNA, 837 bp, Staphylococcus saprophyticus; identical to SEQ ID NO: 245
  ref <308>: DATABASE ACCESSION NUMBER: ATCC 35552

SEQ ID NO: 867 - DNA, 818 bp, Zoogloae ramigera
  ref <308>: DATABASE ACCESSION NUMBER: ATCC 25935
aaggtattcgatgccttgaaaatggaaggctccgagctgaccctggaagtacaacagcagctgggcgacggcattgtccgtaccattgcactgggtacctccgacggcctgcgtcgcggcatgatgatccagaacaccggcaaacctatcatggtgccagtcggtaaagcaaccctgggtcgcatcatggacgtgctgggtaacccgatcgacgaatgcggcgcggtcgctcacgaccagatcgcttcgatccaccgcgctcctcctgcgtacgacgaactgtcgccatcgcaagatctgctggaaaccggcattaaagttattgacctggtgtgcccgttcgccaagggcggtaaagtcggtctgttcggcggtgcaggtgtgggcaagaccgtgaacatgatggaactgatcaacaacatcgccaaagcacactcgggtctgtccgtgtttgccggtgtgggtgagcgtacccgtgaaggtaacgacttctaccacgagatggctgacgccaaagtggtcgatctggaaaatccagagaactccaaggttgcgatggtctacggtcagatgaatgaaccaccaggcaaccgtctgcgcgtggcgctgaccggtctgaccatggctgaagcattccgtgacgaaggcaaagacgttctgttcttcgtggacaacatctaccgcttcaccctggccggtaccgaagtatcggcactgctgggccgtatgccatcggctgtgggttaccagcctacgctggccgaagaaatgggtcgcctgcaagagcgcatcacttcgaccaagaccggttcgatcac

SEQ ID NO: 868 - DNA, 778 bp, Staphylococcus saprophyticus
  ref <308>: DATABASE ACCESSION NUMBER: ATCC 43867
ctatcttagtagtatctgctgctgatggcccaatgccacaaactcgtgaacacattcttttatcacgtaacgttggtgttccagcattagttgtattcttaaacaaagttgacatggttgacgatgaagaattattagaattagtagaaatggaagttcgtgacttattaagcgaatatgacttcccaggtgacgatgtacctgtaatctctggttctgcattaaaagctttagaaggcgacgctgactatgagcaaaaaatcttagacttaatgcaagctgttgatgacttcattccaacaccagaacgtgattctgacaaaccattcatgatgccagttgaggacgtattctcaatcactggtcgtggtactgttgctacaggccgtgttgaacgtggtcaaatcaaagtcggtgaagaaatcgaaatcatcggtatgcaagaagaatcaagcaaaacaactgttactggtgtagaaatgttccgtaaattattagactacgctgaagctggtgacaacattggtgcattattacgtggtgtttcacgtgatgacgtacaacgtggtcaagttttagctgctcctggtactattacaccacatacaaaattcaaagcggatgtttacgttttatctaaagatgaaggtggtcgtcatacaccattcttcactaactaccgcccacaattctatttccgtactactgacgtaactggtgttgttaacttaccagaaggtactgaaatggttatgcctggcgataacgttgaaatgga

SEQ ID NO: 869 - DNA, 640 bp, Enterococcus casseliflavus
  strain R689
tggtcctatgcctcaaacacgtgaacacatcttgttatcacgtaacgttggtgtaccatacatcgttgttttcttaaacaaaatggatatggttgatgacgaagaattactagaattagttgaaatggaagttcgtgacttattgtcagaatatgacttcccaggcgacgatgttcctgtaatcgctggttctgctttgaaagctcttgaaggcgatgcttcatacgaagaaaaaatcatggaattaatggctgcagttgacgaatacgttccaactccagaacgtgacactgacaaaccattcatgatgccagtcgaagacgtattctcaatcactggacgtggtactgttgctacaggccgtgttgaacgtggacaagttcgcgttggtgacgaagttgaaatcgttggtattgctgaagaaactgctaaaacaactgtaactggtgttgaaatgttccgtaaattgttagactatgctgaagcaggggataacattggtgcattgctacgtggtgttgctcgtgaagacatccaacgtggacaagtattggctaaagctggtacaatcacacctcatacaaaatttaaagctgaagtttacgttttaacaaaagaagaaggtggacgtcacactcca

SEQ ID NO: 870 - DNA, 644 bp, Enterococcus casseliflavus
  strain R754
gtcctatgcctcaaacacgtgaacacatcttgttatcacgtaacgttggtgtaccatacatcgttgttttcttaaacaaaatggatatggttgatgacgaagaattactagaattagttgaaatggaagttcgtgacttattgtcagaatatgacttcccaggcgacgatgttcctgtaatcgctggttctgctttgaaagctcttgaaggcgatgcttcatacgaagaaaaaatcatggaattaatggctgcagttgacgaatacgttccaactccagaacgtgacactgacaaaccattcatgatgccagtcgaagacgtattctcaatcactggacgtggtactgttgctacaggccgtgttgaacgtggacaagttcgcgttggtgacgaagttgaaatcgttggtattgctgaagaaactgctaaaacaactgtaactggtgttgaaatgttccgtaaattgttagactatgctgaagcaggggataacattggtgcattgctacgtggtgttgctcgtgaagacatccaacgtggacaagtattggctaaagctggtacaatcacacctcatacaaaatttaaagctgaagtttacgttttaacaaaagaagaaggtggacgtcacacaccattcttc

SEQ ID NO: 871 - DNA, 637 bp, Enterococcus flavescens
  strain R758
tcctatgcctcaaacacgtgaacacatcttgttatcacgtaacgttggtgtaccatacatcgttgttttcttaaacaaaatggatatggttgatgacgaagaattactagaattagttgaaatggaagttcgtgacttattgtcagaatatgacttcccaggcgacgatgttcctgtaatcgctggttctgctttgaaagctcttgaaggcgatgcttcatacgaagaaaaaatcatggaattaatggctgcagttgacgaatacgttccaactccagaacgtgacactgacaaaccattcatgatgccagtcgaagacgtattctcaatcactggacgtggtactgttgctacaggccgtgttgaacgtggacaagttcgcgttggtgacgaagttgaaatcgttggtattgctgaagaaactgctaaaacaactgtaactggtgttgaaatgttccgtaaattgttagactatgctgaagcaggggataacattggtgcattgctacgtggggttgctcgtgaagacatccaacgtggacaagtattagctaaagctggtacaatcacacctcatacaaaatttaaagctgaagtttacgttttaacaaaagaagaaggtggacgtcacactcca

SEQ ID NO: 872 - DNA, 643 bp, Enterococcus gallinarum
  strain R631
gtcctatgcctcaaactcgtgaacacatcttgttatcacgtaacgttggcgtaccatacatcgttgttttcttgaacaaaatggatatggttgatgacgaagaattgctagaattagttgaaatggaagttcgtgacctattgtctgaatatgacttcccaggcgacgatgttcctgtaatcgccggttctgctttgaaagctcttgaaggagatccttcatacgaagaaaaaatcatggaattgatggctgcagttgacgaatacgttccaactccagaacgtgatactgacaaaccattcatgatgccagtcgaagacgtattctcaatcactggacgtggtactgttgctacaggccgtgttgaacgtggacaagttcgcgttggtgatgaagtagaaatcgttggtattgctgacgaaactgctaaaacaactgtaacaggtgttgaaatgttccgtaaattgttagactatgctgaagcaggggataacattggtgcattgctacgtggggttgctcgtgaagacatccaacgtggacaagtattggctaaagctggtacaatcacacctcatacaaaattcaaagctgaagtttatgttttgacaaaagaagaaggtggacgtcacactccattctt

SEQ ID NO: 873 - DNA, 641 bp, Enterococcus gallinarum
  strain R691
gtcctatgcctcaaactcgtgaacacatcttgttatcacgtaacgttggcgtaccatacatcgttgttttcttgaacaaaatggatatggttgatgacgaagaattgctagaattagttgaaatggaagttcgtgacctattgtctgaatatgacttcccaggcgacgatgttcctgtaatcgccggttctgctttgaaagctcttgaaggagatccttcatacgaagaaaaaatcatggaattgatggctgcagttgacgaatacgttccaactccagaacgtgatactgacaaaccattcatgatgccagtcgaagacgtattctcaatcactggacgtggtactgttgctacaggccgtgttgaacgtggacaagttcgcgttggtgatgaagtagaaatcgttggtattgctgacgaaactgctaaaacaactgtaacaggtgttgaaatgttccgtaaattgttagactatgctgaagcaggggataacattggtgcattgctacgtggggttgctcgtgaagacatccaacgtggacaagtattggctaaagctggtacaatcacacctcatacaaaattcaaagctgaagtttatgttttgacaaaagaagaaggtggacgtcacactccattc

SEQ ID NO: 874 - DNA, 681 bp, Staphylococcus haemolyticus
  strain LSPQ 2514
accagcattagtagtattcttaaataaagttgacatggttgacgatgaagaattattagaattagttgaaatggaagtacgtgacttattatctgaatacgacttcccaggtgacgatgtacctgtaatcgctggttcagcattaaaagctttagaaggcgatgctcaatacgaagaaaaaatcttagaattaatgcaagcagttgatgactacattccaactccagaacgtgattctgacaaaccattcatgatgccagttgaggacgtattctcaatcactggtcgtggtactgttgctacaggccgtgttgaacgtgggcaaatcaaagttggtgaagaagttgaaatcattggtatccatgacacttctaaaacaactgttactggtgtagaaatgttccgtaaattattagactacgctgaagctggtgacaacatcggtgcattattacgtggtgttgctcgtgaagacgtacaacgtggtcaagtattagctgctccaggttcaatcacacctcacacaaaatttaaagcagacgtatacgttttatctaaagacgaaggtggacgtcacactccattcttcacaaactatcgtccacaattctatttccgtactactgacgtaactggtgttgttaacttaccagaaggtactgaaatggttatgcctggcga

SEQ ID NO: 875 - DNA, 675 bp, Staphylococcus epidermidis
  strain R591
attatcacgtaacgttggtgtaccagcattagttgtattcttaaacaaagttgacatggtagacgacgaagaattattagaattagttgaaatggaagttcgtgacttattaagcgaatatgacttcccaggtgacgatgtacctgtaatcgctggttctgcattaaaagcattagaaggcgatgctgaatacgaacaaaaaatcttagacttaatgcaagcagttgatgattacattccaactccagaacgtgattctgacaaaccattcatgatgccagttgaggacgtattctcaatcactggtcgtggtactgttgctacaggccgtgttgaacgtggtcaaatcaaagttggtgaagaagttgaaatcatcggtatgcacgaaacttctaaaacaactgttactggtgtagaaatgttccgtaaattattagactacgctgaagctggtgacaacatcggtgctttattacgtggtgttgcacgtgaagacgtacaacgtggtcaagtattagctgctcctggttctattacaccacacacaaaattcaaagctgaagtatacgtattatctaaagatgaaggtggacgtcacactccattcttcactaactatcgcccacaattctatttccgtactactgacgtaactggtgttgtaaacttaccaga

SEQ ID NO: 876 - DNA, 704 bp, Staphylococcus epidermidis
  strain CSG 10
tcttattatcacgtaacgttggtgtaccagcattagttgtattcttaaacaaagttgacatggtagacgacgaagaattattagaattagttgaaatggaagttcgtgacttattaagcgaatatgacttcccaggtgacgatgtacctgtaatcgctggttctgcattaaaagcattagaaggcgatgctgaatacgaacaaaaaatcttagacttaatgcaagcagttgatgattacattccaactccagaacgtgattctgacaaaccattcatgatgccagttgaggacgtattctcaatcactggtcgtggtactgttgctacaggccgtgttgaacgtggtcaaatcaaagttggtgaagaagttgaaatcatcggtatgcacgaaacttctaaaacaactgttactggtgtagaaatgttccgtaaattattagactacgctgaagctggtgacaacatcggtgctttattacgtggtgttgcacgtgaagacgtacaacgtggtcaagtattagctgctcctggttctattacaccacacacaaaattcaaagctgaagtatacgtattatctaaagatgaaggtggacgtcacactccattcttcactaactatcgcccacaattctatttccgtactactgacgtaactggtgttgtaaacttaccagaaggtacagaaatggttatgcctggc

SEQ ID NO: 877 - DNA, 770 bp, Staphylococcus epidermidis
  ref <308>: DATABASE ACCESSION NUMBER: ATCC 35984
tcttagttgtatctgctgctgacggtccaatgccacaaactcgtgaacacatcttattatcacgtaacgttggtgtaccagcattagttgtattcttaaacaaagttgacatggtagacgacgaagaattattagaattagttgaaatggaagttcgtgacttattaagcgaatatgacttcccaggtgacgatgtacctgtaatcgctggttctgcattaaaagcattagaaggcgatgctgaatacgaacaaaaaatcttagacttaatgcaagcagttgatgattacattccaactccagaacgtgattctgacaaaccattcatgatgccagttgaggacgtattctcaatcactggtcgtggtactgttgctacaggccgtgttgaacgtggtcaaatcaaagttggtgaagaagttgaaatcatcggtatgcacgaaacttctaaaacaactgttactggtgtagaaatgttccgtaaattattagactacgctgaagctggtgacaacatcggtgctttattacgtggtgttgcacgtgaagacgtacaacgtggtcaagtattagctgctcctggttctattacaccacacacaaaattcaaagctgaagtatacgtattatctaaagatgaaggtggacgtcacactccattcttcactaactatcgcccacaattctatttccgtactactgacgtaactggtgttgtaaacttaccagaaggtacagaaatggttatgcctggcgacaacgttgaaatg

SEQ ID NO: 878 - DNA, 716 bp, Staphylococcus epidermidis
  ref <308>: DATABASE ACCESSION NUMBER: ATCC 35983
ttgtattcttaaacaaagttgacatggtagacgacgaagaattattagaattagttgaaatggaagttcgtgacttattaagcgaatatgacttcccaggtgacgatgtacctgtaatcgctggttctgcattaaaagcattagaaggcgatgctgaatacgaacaaaaaatcttagacttaatgcaagcagttgatgattacattccaactccagaacgtgattctgacaaaccattcatgatgccagttgaggacgtattctcaatcactggtcgtggtactgttgctacaggccgtgttgaacgtggtcaaatcaaagttggtgaagaagttgaaatcatcggtatgcacgaaacttctaaaacaactgttactggtgtagaaatgttccgtaaattattagactacgctgaagctggtgacaacatcggtgctttattacgtggtgttgcacgtgaagacgtacaacgtggtcaagtattagctgctcctggttctattacaccacacacaaaattcaaagctgaagtatacgtattatctaaagatgaaggtggacgtcacactccattcttcactaactatcgcccacaattctatttccgtactactgacgtaactggtgttgtaaacttaccagaaggtacagaaatggttatgcctggcgacaacgttgaaatgacagttgaattaatcgctccaatcgctatcgaa

SEQ ID NO: 879 - DNA, 640 bp, Enterococcus gallinarum
  strain R764
cggtcctatgcctcaaactcgtgaacacatcttgttatcacgtaacgttggcgtaccatacatcgttgttttcttgaacaaaatggatatggttgatgacgaagaattgctagaattagttgaaatggaagttcgtgacctattgtctgaatatgacttcccaggcgacgatgttcctgtaatcgccggttctgctttgaaagctcttgaaggagatccttcatacgaagaaaaaatcatggaattgatggctgcagttgacgaatacgttccaactccagaacgtgatactgacaaaccattcatgatgccagtcgaagacgtattctcaatcactggacgtggtactgttgctacaggccgtgttgaacgtggacaagttcgcgttggtgatgaagtagaaatcgttggtattgctgacgaaactgctaaaacaactgtaacaggtgttgaaatgttccgtaaattgttagactatgctgaagcaggggataacattggtgcattgctacgtggggttgctcgtgaagacatccaacgtggacaagtattggctaaagctggtacaatcacacctcatacaaaattcaaagctgaagtttatgttttgacaaaagaagaaggtggacgtcacactcca

SEQ ID NO: 880 - DNA, 831 bp, Pseudomonas aeruginosa
  strain PAO-1
cggcgcgatcctggtttgctcggctgccgacggccccatgccgcagacccgcgagcacatcctgctgtcccgccaggtaggcgttccctacatcgtcgtgttcctgaacaaggccgacatggtcgacgacgccgagctgctggaactggtcgagatggaagttcgcgatctgctgaacacctacgacttcccgggcgacgacactccgatcatcatcggttccgcgctgatggcgctggaaggcaaggatgacaacggcatcggcgtaagcgccgtgcagaagctggtagagaccctggactcctacattccggagccggttcgtgccatcgaccagccgttcctgatgccgatcgaagacgtgttctcgatctccggccgcggtaccgtggtaaccggtcgtgtagagcgcggcatcatcaaggtccaggaagaagtggaaatcgtcggcatcaaggcgaccaccaagactacctgcaccggcgttgaaatgttccgcaagctgctcgacgaaggtcgtgctggtgagaacgttggtatcctgctgcgtggcaccaagcgtgaagacgtagagcgtggccaggttctggccaagccgggcaccatcaagccgcacaccaagttcgagtgcgaagtgtacgtgctgtccaaggaagaaggtggtcgtcacaccccgttcttcaagggctaccgtccgcagttctacttccgtaccaccgaygtgaccggtaactgcgaactgccggaaggcgtagagatggtaatgccgggcgacaacatcaagatggttgtcaccctgatcgctccgatcgccatggaagatggcctgcg

SEQ ID NO: 881 - DNA, 642 bp, Enterococcus casseliflavus
  strain R421
cctatgcctcaaacacgtgaacacatcttgttatcacgtaacgttggtgtaccatacatcgttgttttcttaaacaaaatggatatggttgatgacgaagaattactagaattagttgaaatggaagttcgtgacttattgtcagaatatgacttcccaggcgacgatgttcctgtaatcgctggttctgctttgaaagctcttgaaggcgatgcttcatacgaagaaaaaatcatggaattaatggctgcagttgacgaatacgttccaactccagaacgtgacactgacaaaccattcatgatgccagtcgaagacgtattctcaatcactggacgtggtactgttgctacaggccgtgttgaacgtggacaagttcgcgttggtgacgaagttgaaatcgttggtattgctgaagaaactgctaaaacaactgtaactggtgttgaaatgttccgtaaattgttagactatgctgaagcaggggataacattggtgcattgctacgtggtgttgctcgtgaagacatccaacgtggacaagtattggctaaagctggtacaatcacacctcatacaaaatttaaagctgaagtttacgttttaacaaaagaagaaggtggacgtcacacaccattcttc

SEQ ID NO: 882 - DNA, 636 bp, Enterococcus casseliflavus
  strain R775
cctatgcctcaaacacgtgaacacatcttgttatcacgtaacgttggtgtaccatacatcgttgttttcttaaacaaaatggatatggttgatgacgaagaattactagaattagttgaaatggaagttcgtgacttattgtcagaatatgacttcccaggcgacgatgttcctgtaatcgctggttctgctttgaaagctcttgaaggcgatgcttcatacgaagaaaaaatcatggaattaatggctgcagttgacgaatacgttccaactccagaacgtgacactgacaaaccattcatgatgccagtcgaagacgtattctcaatcactggacgtggtactgttgctacaggccgtgttgaacgtggacaagttcgcgttggtgacgaagttgaaatcgttggtattgctgaagaaactgctaaaacaactgtaactggtgttgaaatgttccgtaaattgttagactatgctgaagcaggggataacattggtgcattgctacgtggtgttgctcgtgaagacatccaacgtggacaagtattggctaaagctggtacaatcacacctcatacaaaatttaaagctgaagtttacgttttaacaaaagaagaaggtggacgtcatacacca

SEQ ID NO: 883 - DNA, 641 bp, Enterococcus faecalis
  strain R422
ggtcctatgcctcaaacacgtgaacatatcttattatcacgtaacgttggtgtaccatacatcgttgtattcttaaacaaaatggatatggttgatgacgaagaattattagaattagtagaaatggaagttcgtgacttattatcagaatacgatttcccaggcgatgatgttccagttatcgcaggttctgctttgaaagctttagaaggcgacgagtcttatgaagaaaaaatcttagaattaatggctgcagttgacgaatatatcccaactccagaacgtgatactgacaaaccattcatgatgccagtcgaagacgtattctcaatcactggacgtggtactgttgctacaggccgtgttgaacgtggtgaagttcgcgttggtgacgaagttgaaatcgttggtattaaagacgaaacatctaaaacaactgttacaggtgttgaaatgttccgtaaattattagactacgctgaagcaggcgacaacatcggtgctttattacgtggtgtagcacgtgaagatatcgaacgtggacaagtattagctaaaccagctacaatcactccacacacaaaattcaaagctgaagtatacgtattatcaaaagaagaaggcggacgtcacactccatt

SEQ ID NO: 884 - DNA, 640 bp, Enterococcus faecalis
  strain R575
tatgcctcaaacacgtgaacatatcttattatcacgtaacgttggtgtaccatacatcgttgtattcttaaacaaaatggatatggttgatgacgaagaattattagaattagtagaaatggaagttcgtgacttattatcagaatacgatttcccaggcgatgatgttccagttatcgcaggttctgctttgaaagctttagaaggcgacgagtcttatgaagaaaaaatcttagaattaatggctgcagttgacgaatatatcccaactccagaacgtgatactgacaaaccattcatgatgccagtcgaagacgtattctcaatcactggacgtggtactgttgctacaggccgtgttgaacgtggtgaagttcgcgttggtgacgaagttgaaatcgttggtattaaagacgaaacatctaaaacaactgttacaggtgttgaaatgttccgtaaattattagactacgctgaagcaggcgacaacatcggtgctttattacgtggtgttgcacgtgaagatatcgaacgtggacaagtattagctaaaccagctacaatcactccacacacaaaattcaaagctgaagtatacgtattatcaaaagaagaaggcggacgtcacactccattcttc

SEQ ID NO: 885 - DNA, 632 bp, Enterococcus faecium
  strain R492
tgcctcaaactcgtgaacacatcctattgtctcgtcaagttggtgttccttacatcgttgtattcttgaacaaagtagacatggttgatgacgaagaattactagaattagttgaaatggaagttcgtgacctattaacagaatacgaattccctggtgacgatgttcctgtagttgctggatcagctttgaaagctctagaaggcgacgcttcatacgaagaaaaaattcttgaattaatggctgcagttgacgaatacatcccaactccagaacgtgacaacgacaaaccattcatgatgccagttgaagacgtgttctcaattactggacgtggtactgttgctacaggtcgtgttgaacgtggacaagttcgcgttggtgacgaagttgaagttgttggtattgctgaagaaacttcaaaaacaacagttactggtgttgaaatgttccgtaaattgttagactacgctgaagctggagacaacattggtgctttactacgtggtgttgcacgtgaagacatccaacgtggacaagttttagctaaaccaggtacaatcacacctcatacaaaattctctgcagaagtatacgtgttgacaaaagaagaaggtggacgtcatactcca

SEQ ID NO: 886 - DNA, 640 bp, Enterococcus faecium
  strain R576
cggcccaatgcctcaaactcgtgaacacatcctattgtctcgtcaagttggtgttccttacatcgttgtattcttgaacaaagtagacatggttgatgacgaagaattactagaattagttgaaatggaagttcgtgacctattaacagaatacgaattccctggtgacgatgttcctgtagttgctggatcagctttgaaagctctagaaggcgacgcttcatacgaagaaaaaattcttgaattaatggctgcagttgacgaatacatcccaactccagaacgtgacaacgacaaaccattcatgatgccagttgaagacgtgttctcaattactggacgtggtactgttgctacaggtcgtgttgaacgtggacaagttcgcgttggtgacgaagttgaagttgttggtattgctgaagaaacttcaaaaacaacagttactggtgttgaaatgttccgtaaattgttagactacgctgaagctggagacaacattggtgctttactacgtggtgttgcacgtgaagacatccaacgtggacaagttttagctaaaccaggtacaatcacacctcatacaaaattctctgcagaagtatacgtgttgacaaaagaagaaggtggacgtcatactcca

SEQ ID NO: 887 - DNA, 806 bp, Zoogloae ramigera
  ref <308>: DATABASE ACCESSION NUMBER: ATCC 25935
atcctggtttgctccgcagctgacggcccaatgccacagacccgcgagcacatcctgctggcccgccaagttggcgttccatacatcatcgtgttcctgaacaagtgcgacctggttgacgacgcagaactgctggaactggtcgaaatggaagtgcgtgaattgctgtcgaaatacgagttcccaggcgacgacgtaccaatcatcaagggttcggcacgtatggcgctggaaggcaaagaaggcgagatgggcgttgacgccatcatgcgtctggccgatgcactggacagctacatccctacgccagagcgcgcagtcgatggcgccttcctgatgccagtggaagacgtgttctcgatctcgggtcgcggtaccgttgtgaccggtcgtatcgagcgcggcgtgatcaaggtcggcgaagagatcgaaatcgtcggcattatcgacaccgtcaaaaccacttgcaccggcgtggaaatgttccgcaagctgctggaccagggtcaagccggcgacaacgttggtctgctgctgcgcggcaccaagcgtgaagacgtacagcgtggtcaggttctggccaagccagcgtcgatcaagccgcacaaccacttcaccggcgagatctacgttctgtcgaaagatgaaggcggccgtcacaccccgttcttcaacaactatcgtccacagttctacttccgtacgactgacgtgaccggttcgatcgaactgccagcagacaaagaaatggtcatgccaggcgacaacgtgtcgatcaccgtcaagctgatcaacccgatcgcgat

SEQ ID NO: 888 - DNA, 634 bp, Enterococcus faecalis
  strain R503
tatgcctcaaacacgtgaacatatcttattatcacgtaacgttggtgtaccatacatcgttgtattcttaaacaaaatggatatggttgatgacgaagaattattagaattagtagaaatggaagttcgtgacttattatcagaatacgatttcccaggcgatgatgttccagttatcgcaggttctgctttgaaagctttagaaggcgacgagtcttatgaagaaaaaatcttagaattaatggctgcagttgacgaatatatcccaactccagaacgtgatactgacaaaccattcatgatgccagtcgaagacgtattctcaatcactggacgtggtactgttgctacaggccgtgttgaacgtggtgaagttcgcgttggtgacgaagttgaaatcgttggtattaaagacgaaacatctaaaacaactgttacaggtgttgaaatgttccgtaaattattagactacgctgaagcaggcgacaacatcggtgctttattacgtggtgtagcacgtgaagatatcgaacgtggacaagtattagctaaaccagctacaatcactccacacacaaaattcaaagctgaagtatacgtattatcaaaagaagaaggcggacgtcacactcca

SEQ ID NO: 889 - DNA, 493 bp, Aspergillus fumigatus
  ref <308>: DATABASE ACCESSION NUMBER: ATCC 14110
tgtcttcatccaggaattgattgtgagtcgttccacatgctcacctagttttcgctcgatcttttcactaacgcaaaccatgtagaacaacattgccaaggcccacggtggttactccgtcttcactggtgttggtgagcgtactcgtgagggtaacgatctgtaccacgaaatgcaggagactggtgtcattcagctcgagggtgaatccaaggtcgcactggtgttcggacagatgaacgagccccccggtgcccgtgcccgtgtcgcccttaccggtctgaccattgccgagtacttccgtgacgaggagggtcaggacgtgctgctcttcattgacaacattttccgtttcacccaggccggttctgaggtgtctgcccttctcggtcgtatcccctctgccgtcggttaccagcccaccctggccgtcgacatgggtggtatgcaggagcgtatcaccaccaccaagaagggttctattacctccgtc

SEQ ID NO: 890 - DNA, 466 bp, Penicillium marneffei
  ref <308>: DATABASE ACCESSION NUMBER: ATCC 64101
ttgattgtacgtctttacctttctgcctgactgtttacgacaactaacgaaagcgtagaacaacattgccaaggctcacggtggttactctgtcttcactggtgtcggtgaacgtactcgtgagggtaacgatttgtaccacgaaatgcaggaaactggtgtcattcagctcgagggtgaatccaaggtcgccctcgtgttcggtcagatgaacgagccccccggtgcccgtgcccgtgtcgctcttactggtttgaccattgccgagtacttccgtgacgaggaaggtcaggacgtgcttctcttcattgacaacattttccgtttcactcaggccggttctgaggtgtctgcccttctgggtcgtatcccctctgccgtcggttaccagcccacccttgccgtcgacatgggtatcatgcaggagcgtattaccaccaccaccaagggttccatcacctccgtc

SEQ ID NO: 891 - DNA, 478 bp, Paecilomyces lilacinus
  ref <308>: DATABASE ACCESSION NUMBER: ATCC 42570
aggagctgatcaacaacatcgccaaggctcacggtggttactccgtcttcactggtgtcggtgagcgtacccgtgagggtaacgatctgtaccacgaaatgcaggagacctcggtcattcagctcgagggcgagtctaaggtggccctggtctttggtcagatgaacgagcccccgggtgctcgtgcccgtgtcgctcttactggtcttaccgtcgccgagtacttccgtgaccaggagggtcaggatggttagttctcgtccactcatgccgaaacatgtgcgtgttccgaggctaatcaacgtgccagtgctgcttttcatcgacaacattttccgattcacacaggccggttccgaggtgtctgccctgctgggtcgtatcccctctgccgtcggttaccagcccaccctcgccgtcgacatgggtggcatgcaggagcgtatcaccaccaccaagaagggctctatcacctccg

SEQ ID NO: 892 - DNA, 481 bp, Penicillium marneffei
  ref <308>: DATABASE ACCESSION NUMBER: ATCC 58950
gtctttatccaggagttgattgtacgtctttacctttctgcctgactgtttacgacaactaacgaaagcgtagaacaacattgccaaggctcacggtggttactctgtcttcactggtgtcggtgaacgtactcgtgagggtaacgatttgtaccacgaaatgcaggaaactggtgtcattcagctcgagggtgaatccaaggtcgccctcgtgttcggtcagatgaacgagccccccggtgcccgtgcccgtgtcgctcttactggtttgaccattgccgagtacttccgtgacgaggaaggtcaggacgtgcttctcttcattgacaacattttccgtttcactcaggccggttctgaggtgtctgcccttctgggtcgtatcccctctgccgtcggttaccagcccacccttgccgtcgacatgggtatcatgcaggagcgtattaccaccaccaccaagggttccatcacctccgtc

SEQ ID NO: 893 - DNA, 1208 bp, Sporothrix schenckii
  ref <308>: DATABASE ACCESSION NUMBER: ATCC 14285
ctcgtccgtggtgctaaggccactgacactggttsccccattaccatccscgtcggccccggtaccctcggtcgcatcatgaacgtcaccggtgacccgatcgacgagcgcggtcccatcaagaccgacaagttccgtcccatccacgctgaggctcccgagttcgttgaccagtcgaccaccgctgaggttctcgtgactggtatcaaggtcgtcgatctgcttgctccctacgcccgtggtggtaagattggtctgtttggcggtgccggtgttggcaagaccgtgttcatccaggagctcatcaacaacatcgccaaggcccacggtggttactccgtcttcaccggtgtcggcgagcgtacccgtgagggtaacgatctgtaccacgaaatgcaggagacctctgtcattcagcttgacggtgactccaaggtcgccctggtgttcggtcagatgaacgagccccctggtgctcgtgcccgtgtcgccttgaccggtttgactgtcgctgagtacttccgtgacgaggagggccaggatggtatgttttgaattatttccttgtcgtacagttccaaatcgaagaattactaacttgtcagtgcttctcttcatcgacaacattttccgcttcacccaggccggttctgaggtgtctgcccttctgggtcgtattccctccgctgtcggttaccagcccacgctcgccgtggacatgggtctgatgcaggagcgtattaccaccacccgcaagggctcaattacctccgtccaggccgtctacgtgcccgctgacgatctgacggatcccgcccccgccaccaccttcgcccatctggacgccaccactgtgctgtcccgaggtatctctgagctgggtatctaccccgctgtcgaccccctcgactccaagtcgcgtatgctggacccccgtattgtcggtgacgaccactacgagaccgccactcgcgtccagcagatcctccaagagtacaagtcgctgcaggacatcatcgccattctgggtatggacgagctgtctgaggccgacaagcttacagtcgagcgtgctcgtaagatccagcgtttcctgagccagccgttcacggtcgcgcaggtcttcactggtatcgaaggccagctggtcgatctgaaggacactatcgcttcgttcaaggctatcctgagcggtgagggtgacagcc

SEQ ID NO: 894 - DNA, 534 bp, Malbranchea filamentosa
  ref <308>: DATABASE ACCESSION NUMBER: ATCC 48174
ttcaggaacttattgtaagccgccctctttatgcattgagggtgaataagaaggctgacaggtaatagaacaacattgccaaggctcacggtggttactccgtgttcactggtgtcggtgagcgtacccgtgaaggaaacgatctgtaccatgaaatgcaggaaacccgcgtcatccagcttgatggcgagtctaaggtcgcccttgtgttcggtcagatgaacgagccccctggagcccgtgcccgtgtcgctcttactggtcttaccgttgccgaatacttccgtgacgaggagggccaagatggtacgcctttttactcttcttattcttcgggtcggactacagaactaacctgctccagtgcttctcttcattgataacattttccgtttcacacaagccggttctgaggtgtctgccttgcttggacgtattccctctgccgtcggttaccagcccactctcgccgtcgacatgggtggtatgcaggaacgtatcacaaccaccaacaagggttccattacttccgtg

SEQ ID NO: 895 - DNA, 448 bp, Paecilomyces lilacinus
  ref <308>: DATABASE ACCESSION NUMBER: ATCC 60735
caaggctcacggtggttactccgtcttcactggtgtcggtgagcgtacccgtgagggtaacgatctgtaccacgaaatgcaggagacctcggtcattcagctcgagggcgagtctaaggtggccctggtctttggtcagatgaacgagcccccgggtgctcgtgcccgtgtcgctcttactggtcttaccgtcgccgagtacttccgtgaccaggagggtcaggatggttagttctcgtccactcatgccgaaacatgtgcgtgttccgaggctaatcaacgtgccagtgctgcttttcatcgacaacattttccgattcacccaggccggttccgaggtgtctgccctgctgggtcgtatcccctctgccgtcggttaccagcccaccctcgccgtcgacatgggtggcatgcaggagcgtatcaccaccaccaagaagggctctat

SEQ ID NO: 896 - DNA, 483 bp, Aspergillus niger
  ref <308>: DATABASE ACCESSION NUMBER: ATCC 9508
attcaggagctgattgtaagttgccaatccatgaactggagatttggtgtgacccatagaactaacaaattatttagaacaacatcgccaaggctcacggtggttactccgtcttctgtggtgtcggtgagcgtactcgtgagggtaacgatctgtaccacgaaatgcaggagactggtgtcatccagctcgagggtgactccaaggtcgctctggtcttcggtcagatgaacgagcccccgggtgcccgtgcccgtgtcgcccttaccggtctgaccattgccgagtacttccgtgacgaggagggtcaggacgtgctgctcttcattgacaacattttccgtttcacccaggccggttctgaggtgtctgcccttctgggtcgtatcccctctgccgtcggttaccagcccactctggccgtcgacatgggtggtatgcaggagcgtattaccaccaccaccaagggttccattacctccg

SEQ ID NO: 897 - DNA, 1124 bp, Aspergillus fumigatus
  ref <308>: DATABASE ACCESSION NUMBER: ATCC 14110
aagctcaagtccgagcgtgagcgtggtatcaccatcgacattgccctctggaagttccagactcccaagtatgaggtcactgtcatcggtaagctcgactcgccccgatatgttttggtgctgtagctaacacgatctgaagatgcccccggtcaccgtgacttcatcaagaacatgatcactggtacctcccaggctgactgcgctatcctcatcattgcctccggtactggtgagttcgaggctggtatctccaaggatggccagacccgtgagcacgctctgctggctttcaccctcggtgtcaagcagctcatcgtcgccctcaacaagatggacacctgcaagtggtccgaggatcgttacaacgaaattgtcaaggaaacctccaacttcatcaagaaggtcggctacaaccccaaggccgttcccttcgtccccatctctggcttcaacggtgacaacatgcttgagccctcctccaactgcccctggtacaagggatgggagaaggagaccaaggccggcaaggtcactggtaagaccctcatcgaggccatcgacgccattgagccccctgtccgtccctycaacaagcccctccgtcttcccctccaggatgtctacaagatctctggtatcggaacggtccctgtcggccgtgtcgagaccggtatcatcaagcccggcatggtcgtcaccttcgcccccgccaacgtcaccactgaagtcaagtccgtcgagatgcaccaccagcagctccaggagggtgtccccggtgacaacgtcggtttcaacgtcaagaacgtttccgtcaaggaagtccgccgtggtaacgtctgcggtgactccaagaacgatccccctcagggtgctgcctccttcaacgcccaggtcatcgtcctcaaccaccccggtcaggtcggcgctggttacgcccccgtcctcgactgccacactgcccacattgcttgcaagttctctgagctgcttgagaagattgaccgccgtaccggcaagtctgttgagaacaaccccaagttcatcaagtccggtgatgccgccatcgtgaagatggttccttccaagcccatgtgtgtcgagtccttcactgactacccccc

SEQ ID NO: 898 - DNA, 1363 bp, Penicillium marneffei
  strain WSA-214
ctcaaggctgagcgtgagcgtggtatcaccatcgatattgctctctggaagttccagactgccaagtacgaggttaccgtcattgacgcccccggtcaccgtgatttcatcaagaacatgatcactggtacctcccaggccgattgcgctattctcatcattgcctctggtactggtgaattcgaggctggtatctccaaggatggccagactcgtgagcacgctcttttggctttcaccctcggtgtccgtcagctcattgttgccctcaacaagatggacacttgcaagtggtctcagggtgagtactcgtacctgcgtttggccttgaatatcttactaatgcaccatagatcgttacaacgaaattgtcaaggagacttccaacttcatcaagaaggtcggatacaaccctaagaacgttcctttcgttcctatctccggtttcaacggtgacaacatgcttgagccctcccccaactgcccctggtacaagggttgggagaaggagaccaaggccggtaaggtcactggtaagaccctcctcgaggccatcgacgccattgagccccctacccgtcccgccaacaaggttagtccctcctcgactactcaaaccctcctcataagttcatgattacgactcgttcacagcccctccgtcttcccctccaggatgtctacaagatcggtggtattggaacggttcccgtcggtcgtgttgagactggtaccatcgttcctggtatggttgtcaccttgtaagtcactctcctcgcttatcctacctgaaatcatcatgtgctaacttgacactcagcgctcccgccaacgtcaccactgaagtcaagagtgttgaaatgcaccaccagcagctcactgccggtcagcccggtgacaacgttggtttcaacgtgaagaacgtctccgtcaaggaaatccgtcgtggtaacgttgctggtgacagcaagaacgacccccctgccggtgctgcctccttcaacgcccaggtcatcgtcctcaaccaccccggtcaggtcggtgctggttacgccccagtcctcgattgccacactgcccacattgcttgcaagttcgctgagctcctcgagaagattgaccgtcgtaccggaaagtctgttgaggaccaccccaagttcatcaagtccggtgacgctgccatcgtcaagatgattccttccaagcccatgtgtgttgaggctttcaccgagtaccctcctctcggtcgtttcgccgttcgcgagtaagttttatctccgttgtctattttccatccttcccttctcctccgtcttccatatatattttttcagttatatgtgactaaccacaaatcacggga

SEQ ID NO: 899 - DNA, 1147 bp, Piedraia hortai
  ref <308>: DATABASE ACCESSION NUMBER: ATCC 24292
caagctgaaagccgagcgtgagcgtggtatcactatcgacattgccctctggaagttcgagactcccaagtactatgtcaccgtcattggtacgtcgcattatctcactcctcacagaagcacgctcctaacatcacacagacgctcccggtcaccgtgatttcatcaagaacatgatcactggtacctcccaggccgactgcgctatcctcattatcgctgccggtactggtgagttcgaggctggtatctccaaggatggccagactcgtgagcacgccctgctcgcctacaccctcggtgtgcgtcagctcatcgtcgccatcaacaagatggacaccaccaagtggtctgaggcccgttaccaggagatcatcaaggagacctccaacttcatcaagaaggtcggctacaaccccaagaccgtcgctttcgtccccatctctggcttcaacggcgacaacatgcttgccccctccaccaactgcccctggtacaagggatgggagcgtgaggtcaagggcaacaagcagaccggcaagaccctcctcgaggccattgacggcattgagccccccaagcgtccttccgacaagcccctccgtcttcctctccaggatgtttacaagatcggtggtatcggaactgttcctgtcggccgtatcgagactggtgtcctcaagcccggtatggtcgttaccttcgctcccgccaacgtcaccactgaagtcaagtccgtcgagatgcaccacgagcagctcactgagggtcttcccggtgacaacgtcggtttcaacgtgaagaacgtttccgtcaaggacatccgccgtggtaacgttgccagtgactccaagaacgaccccgctctgggtgccgcttctttcgacgcccaggtcatcgtcctcaaccaccccggtcaggtcggtgctggttacgccccggtcctcgattgccacactgcccacattgcttgcaagttctccgagatcaaggagaagatcgaccgccgtaccggcaagtctgttgaggacgcccccaagttcatcaagtctggtgactctgccatcgtcaagatggttccctccaagcccatgtgcgttgaggctttcaccgactaccctcctctgggccgtttcgccgtccgtga

SEQ ID NO: 900 - DNA, 1150 bp, Paecilomyces lilacinus
  ref <308>: DATABASE ACCESSION NUMBER: ATCC 60735
ctcaaggccgagcgtgagcgtggtatcaccatcgacattgccctctggaagttcgagactcccaagtactatgtcaccgtcattggtacgtcgactcgcgcgagactggtcgcaatttccacgtcgctaacgtgcttgaacagacgctcccggccaccgtgacttcatcaagaacatgatcactggtacctcccaggctgactgcgctatcctcattatcgctgccggcactggtgagttcgaggctggtatctccaaggatggccagacccgtgagcacgctctgctcgcctacaccctcggtgttaagcagctcatcgtcgctatcaacaagatggacaccaccaagtggtctgaggcccgtttccaggagatcatcaaggagacctccaacttcatcaagaaggtcggctacaaccccaagaccgtcgctttcgtccccatctctggtttccacggcgacaacatgctttccccctccaccaactgcccctggtacaagggctgggagaaggagaccaaggctggcaagtccaccggcaagaccctccttgaggccatcgactccatcgagccccccaagcgccccagcgacaagcccctccgccttccccttcaggatgtgtacaagatcggcggtatcggcacagtccctgtcggccgtatcgagactggtgtcatcaagcccggcatggtcgtgaccttcgctccttccaacgtcaccaccgaagtcaagtccgttgagatgcaccacgagcagctctccgagggtgtccccggtgacaacgtcggcttcaacgtcaagaacgtctccgtcaaggagatccgtcgtggcaacgtcgccggtgactccaagaacgacccccctctgggtgccgcttctttcgatgcccaggtcatcgtcctcaaccaccccggccaggtcggtgctggctacgcccccgtcctcgactgccacaccgcccacattgcctgcaagttcgccgagatcaaggagaagatcgaccgccgtaccggcaagtctgtcgagtccgcccccaagttcatcaagtctggcgactctgccatcgtcaagatgattccctccaagcccatgtgcgttgaggctttcaccgactaccctcctctgggccgcttcgccgtccgtgac

SEQ ID NO: 901 - DNA, 751 bp, Paracoccidioides brasiliensis
  ref <308>: DATABASE ACCESSION NUMBER: ATCC 32075
taccactaagtggtccgagacccgattcaatgaaattatcaaggaagtcaccaatttcattaagaaggtcggatataaccccaagactgttcctttcgttcccatttctggtttcgagggtgacaacatgatcgagccctctgccaactgcccatggtacaagggctggtccaaggagactgctcagggcaagtactctggcaagacccttcttgaggccatcgacgccattgagccccccacccgtcctaccgataaacctctccgtcttcccctccaggatgtctacaagatctccggtattggcactgttcctgtcggacgtgttgagactggagtcatcaagcccggtatggtcgtgaccttcgctcccgccaacgtcaccactgaagtcaagtccgtcgaaatgcaccaccagcagcttaccgccggtaaccccggtgacaacgtcggcttcaacgtcaagaatgtttccgtcaaagaagtccgccgtggtaacgttgccggtgactctaagaatgatcccccaaagggctgcgattccttcaatgcccaggtcatcgtcctcaaccaccctggtcaggttggcgctggttatgccccagtcctcgactgccatactgcccacattgcctgcaaattcgctgagctccttgagaagattgatcgacgaaccggaaagtctgttgagaacaaccccaagttcatcaagtccggtgatgctgctatcgtcaagatgattccttccaag

SEQ ID NO: 902 - DNA, 1056 bp, Sporothrix schenckii
  ref <308>: DATABASE ACCESSION NUMBER: ATCC 7968
cgtgagcgcggtatcaccatcgatattgctctgtggaagttcgagacccccaagtactacgtcaccgtcattgacgcccccggtcatcgcgatttcatcaagaacatgatcactggtacctcgcaggccgactgcgccattctcatcattgccgctggtactggtgagttcgaggctggtatctccaaggatggccagactcgtgagcacgctctgctcgcctacaccctgggtgtgcggcagctgatcgtcgccatcaacaagatggacacggccaagtgggctgaggctcgttaccaggagatcatcaaggagacctccaacttcatcaagaaggtcggctacaaccccaagactgttgccttcgtccccatctcgggcttccacggcgacaacatgcttactccctcgaccaactgcccctggtacaagggctgggagaaggagggcaagagcggcaaggttaccggtaagactctgctggacgccattgacgccgtcgagccccccaagcgccccacggacaagcccctgcgtctgcccctccaggatgtctacaagatcggcggtatcggcactgtccctgtcggccgtatcgagactggtgtcctgaagcccggcatggtcgtcacctttgccccgtccaacgtcaccactgaagtcaagtccgtcgagatgcaccacgagcagcttgttgagggtgttcccggcgacaacgtcggcttcaacgtcaagaacgtctccgtcaaggagatccgtcgtggcaacgttgccggtgactccaagaacgaccccccctcgggcgccgccaccttcaacgcccaggtcattgtcctgaaccaccccggccaggtcggcaacggctacgccccggttctggactgccacaccgcccacattgcctgcaagttcaccgagatccttgagaagatcgaccgccgtaccggcaagtcggttgagaacaaccccaagttcatcaagtcgggtgacgccgccattgtcaagctgacgccctcgaagcccatgtgcgttgaggccttcactgactacccccct

SEQ ID NO: 903 - DNA, 1366 bp, Penicillium marneffei
  ref <308>: DATABASE ACCESSION NUMBER: ATCC 58950
caaggctgagcgtgagcgtggtatcaccatcgatattgctctctggaagttccagactgccaagtacgaggttaccgtcattgacgcccccggtcaccgtgatttcatcaagaacatgatcactggtacctcccaggccgattgcgctattctcatcattgcctctggtactggtgaattcgaggctggtatctccaaggatggccagactcgtgagcacgctcttttggctttcaccctcggtgtccgtcagctcattgttgccctcaacaagatggacacttgcaagtggtctcagggtgagtactcgtacctgcgtttggccttgaatatcttactaatgcaccatagatcgttacaacgaaattgtcaaggagacttccaacttcatcaagaaggtcggatacaaccctaagaacgttcctttcgttcctatctccggtttcaacggtgacaacatgcttgagccctcccccaactgcccctggtacaagggttgggagaaggagaccaaggccggtaaggtcactggtaagaccctcctcgaggccatcgacgccattgagccccctacccgtcccgccaacaaggttagtccctcctcgactactcaaaccctcctcataagttcagattactgactcgttcacagcccctccgtcttcccctccaggatgtctacaagatcggtggtattggaacggttcccgtcggtcgtgttgagactggtaccatcgttcctggtatggttgtcaccttgtaagtcactctcctcgcttatcctacctgaaatcatcatgtgctaacttgacactcagcgctcccgccaacgtcaccactgaagtcaagagtgttgaaatgcaccaccagcagctcactgccggtcagcccggtgacaacgttggtttcaacgtgaagaacgtctccgtcaaggaaatccgtcgtggtaacgttgctggtgacagcaagaacgacccccctgccggtgctgcctccttcaacgcccaggtcatcgtcctcaaccaccccggtcaggtcggtgctggttacgccccagtcctcgattgccacactgcccacattgcttgcaagttcgctgagctcctcgagaagattgaccgtcgtaccggaaagtctgttgaggaccaccccaagttcatcaagtccggtgacgctgccatcgtcaagatgattccttccaagcccatgtgtgttgaggctttcaccgagtaccctcctctcggtcgtttcgccgttcgcgagtaagttttatctccgttgtctattttccatccttcccttctcctccgtcttccatatatattttttcagttatatgtgactaaccacaaatcacgggaatagc

SEQ ID NO: 904 - DNA, 841 bp, Curvularia lunata
  ref <308>: DATABASE ACCESSION NUMBER: ATCC 26425
ctattatcgttgttgccgcttccgacggtcaaatgccccagactcgtgagcatctgctgctcgcccgccaggtcggtgtccagaagatcgttgtcttcgtcaacaaggtcgatgctgttgaggacaaggagatgttggagctcgtcgagatggagatgcgcgaattgctcagcagctacggcttcgagggcgacgagactcccatcatcatgggatctgccctctgcgccattgagggccgcgaacctgagattggtgtcaaccgaattgatgagctgctcgaggccgttgatacttggatccccacccctcagcgtgagaccgacaagcctttcctcatggccgtcgaggatgtcttctccattgctggtcgtggcactgtcgtctctggccgtgtcgagcgaggtatcctgaagcgcgatgctgaagttgagctcgtcggcaagggcaccgcccccatcaagaccaaggttaccgatatcgagaccttcaagaagtcctgcgaggagtctcgcgctggtgacaactccggtctccttcttcgtggtgtcaagcgtgatgaagtccgccgtggtatggtcgtttccgtccctggacaggtcaaggcgcacaagaagttccttgtctccatgtacgtgttgagcaaggaggaaggtggtcgtcacactggcttcggtgagaactacaggccgcaaatgttcatccgcactgccgacgagtcgtgtgccctgtactggccagaaggcaccgaggacgcccatgacaagcttgttatgcccggtgacaacgtcgagatggtttgcgagctccatgcaccacacgtcttggagcctggtcaacg

SEQ ID NO: 905 - DNA, 967 bp, Aspergillus niger
  ref <308>: DATABASE ACCESSION NUMBER: ATCC 9508
cggtgctatcattgtcgtcgccgcctccgacggtcagatgtacgttaaccttaaaagaataactctccttcagtatatatgcttacactggcgatcaacaggccccagactcgtgagcacttgctgcttgctcgtcaggtcggtgtccagaagatcgttgtcttcgtcaacaaggtcgatgctatcgatgaccccgagatgctggagctcgttgagctggaaatgcgcgagcttctcagcacctacggattcgagggtgaggagacccccatcgtcttcggctctgctctctgcgccattgaggaccgccgccccgacatcggtaccgagcgtatcgacgctctcctcgaggccgttgacacctggatccccactccccagcgtgaccttgacaagcctttcttgatgtccattgaggaagttttctccatccccggtcgtggtaccgtcgcctccggccgtgtcgagcgtggtctcctgaagcgtgatagcgaggttgagatcatcggtaccaccaacgaggtcatcaagaccaaggttaccgacattgagaccttcaagaagtcctgctccgagtcccgcgccggtgacaactccggtctcctgctccgtggtgtccgccgtgaggatctccgccgtggtatggtcattgccgctcctggcagcgccaaggccaacagcaagttcatggtctccatgtacgtcctgaccgaggctgarggtggtcgccgtaccggtttcggtgtccagtaccgtccccagctgttcatccgcactgccggtaagtaaaattgcattctattccgctactagggaaccatctctaattctatttgctacagatgaggctgctgagttcagcttccccgacggagaccagtcccgccgtatcatgcccggtgacaacgtcgagatgatcgtcaagacccaccgccccgtcgccgccgaggccggtcagcgcttcaac

SEQ ID NO: 906 - DNA, 852 bp, Bipolaris hawaiiensis
  ref <308>: DATABASE ACCESSION NUMBER: ATCC 26067
tggtgctattattgttgttgccgcttccgacggtcaaatgccccagactcgtgagcatctgctgctcgcccgtcaggtcggtgttcagaagatcgttgtcttcgttaacaaggtcgacgctgtcgaggacaaggagatgttggagcttgtcgagatggagatgcgcgaactgctcagcagctatggcttcgagggcgacgagacccctatcatcatgggttctgctctctgcgccattgaaggccgtcaacccgacattggtgtcgaacgaattgacgagctgctcgaggctgttgatacttggattcccacccctcagcgtgagaccgaaaagcctttcctcatggccgtcgaggatgtcttctccattgctggtcgtggtaccgtcgtctctggccgtgtcgaacgaggtatcctgaagcgcgatgctgaagttgagcttgtgggcaagggcagcgcacccatcaagaccaaggttaccgatatcgagaccttcaagaagtcttgcgaggagtcccgcgctggtgacaactccggtctccttcttcgtggtgttaagcgtgatgaagtccgccgtggtatggtcgtttccgtccctggacaggttaaggcgcacaagaagttccttgtctccatgtatgtgctgagcaaggaggaaggtggccgacacactggcttcggtgagaactacaggccgcaaatgttcatccgcactgccgacgagtcgtgtgccctgtactggccagaaggcaccgaggatgcccacgacaagcttgtcatgcccggtgacaacgtcgagatggtttgcgagctccatgcaccacacgtcttggagactggtcagcgcttcaa

SEQ ID NO: 907 - DNA, 966 bp, Aspergillus flavus
  ref <308>: DATABASE ACCESSION NUMBER: ATCC 26947
ggtgctattgttgtcgttgctgcttcggatggtcatgatgtatggacaggccctttgctactgaatggtttcaagatctcgcgcttacacgtattataataggccccagacccgggagcacttgctgcttgcccgtcaggtcggtgtccagaagatcgtcgtttttgtcaacaagattgatgccgttgaggaccctgagatgttggagcttgtcgagttggaaatgcgcgagctccttagcagctacggcttcgagggcgaagagactcccatcatcttcggttctgctctgtgtgctttggaggaccgtcgccccgacattggtgccgagcgtatcgacgagctcatgaaggccgttgacacctggatccctacccctcagcgtgatcttgacaagcctttcctcatgtctgtcgaggaagtcttctccatcgccggtcgtggtaccgttgcctccggccgtgtcgaacgtggtatcctgaagaaggacagcgaagtcgagatcatcggaggtagcttcgatgctaccaagaccaaggtcaccgacattgagaccttcaagaagtcttgtgacgagtcccgcgctggtgacaactctggcttgcttctccgtggtatccgtcgtgaagacgtccgccgcggaatgatcattgctgctcctggcagcaccaaggcccacgaccagttcttggtgtccatgtacgttctcactgaggctgagggtggtcgtcgtactggcttcggctccaactaccgcccccaggtgttcgttcgcactgctggtaagtcaagccttttgctcacttaacggtattgattaagttctaactgttgtatcctagatgaggctgctgacctcagcttccccgacggtgatgagtcccggagggtgatgcctggtgacaacgtcgagatggtcctcaagactcaccgccccattgctgctgaggctggccagcgcttcaa

SEQ ID NO: 908 - DNA, 845 bp, Alternaria alternata
  ref <308>: DATABASE ACCESSION NUMBER: ATCC 62099
ggtgctatcatcgtcgttgctgcttccgatggtcagatgccccagacccgtgagcacttgctgctcgcccgtcaggtcggtgttcagaagatcgttgtcttcgtcaacaaggtcgatgctgtcgaagacccggagatgttggaactcgtcgagatggagatgcgtgagttactcaccagctacggcttcgagggcgacgagacacccatcatcatgggttccgctctatgcgccatcgagggccgccagcccgagatcggtgttaccaaggtcgacgagctaatggacgctgtcgactcatggatccccacccctcagcgtgagaccgagaagcctttcctcatggctgttgaggatgtcttctcgattgctggacgtggtaccgtcgtttcgggccgtgtcgagcgcggtatcttgaagcgtgacgctgaagtcgagcttgtcggcaagggcaccgcgccaatcaagaccaaggtcactgatattgagaccttcaagaagtcgtgcgaggagtcgcgcgcgggtgataactccggtcttctcctccgtggtgtcaagcgtgatgacgttcgccgcggtatggttgtttccgttcccggacaagtcaaggctcacaagaagttccttgtctccatgtacgttctaagcaaagaggagggtggtcgtcacaccggcttcggcgagaactacaggccgcaaatgttcatccgaactgccgatgaatcctgcgcacttcacttcccagagggtaccgaggatgcgcacgacaagctagttatgcccggtgacaacgtcgagatggtctgcgaactccaccagccccacgttctagagaccggtcagcg

SEQ ID NO: 909 - DNA, 931 bp, Penicillium marneffei; identical to SEQ ID NO: 505
  ref <308>: DATABASE ACCESSION NUMBER: ATCC 64101

SEQ ID NO: 910 - DNA, 931 bp, Penicillium marneffei; identical to SEQ ID NO: 505
  ref <308>: DATABASE ACCESSION NUMBER: ATCC 58950

SEQ ID NO: 911 - DNA, 20 bp, Artificial Sequence
  Synthetic DNA Sequence
gacggmkkcatgccgcarac

SEQ ID NO: 912 - DNA, 20 bp, Artificial Sequence
  Synthetic DNA Sequence
gacggcgkcatgccgcarac

SEQ ID NO: 913 - DNA, 20 bp, Artificial Sequence
  Synthetic DNA Sequence
gacggysycatgcckcagac

SEQ ID NO: 914 - DNA, 21 bp, Artificial Sequence
  Synthetic DNA Sequence
gaaragctgcggrcgrtagtg

SEQ ID NO: 915 - DNA, 21 bp, Artificial Sequence
  Synthetic DNA Sequence
aaacgcctgaggrcggtagtt

SEQ ID NO: 916 - DNA, 20 bp, Artificial Sequence
  Synthetic DNA Sequence
gccgagctggccggcttcag

SEQ ID NO: 917 - DNA, 22 bp, Artificial Sequence
  Synthetic DNA Sequence
tcgtgctacccgtygccgccat

SEQ ID NO: 918 - DNA, 1391 bp, Escherichia coli
  strain J01672
agagaagcctgtcggcaccgtctggtttgcttttgccactgcccgcggtgaaggcattacccggcgggatgcttcagcggcgaccgtgatgcggtgcgtcgtcaggctactgcgtatgcattgcagaccttgtggcaacaatttctacaaaacacttgatactgtatgagcatacagtataattgcttcaacagaacatattgactatccggtattacccggcatgacaggagtaaaaatggctatcgacgaaaacaaacagaaagcgttggcggcagcactgggccagattgagaaacaatttggtaaaggctccatcatgcgcctgggtgaagaccgttccatggatgtggaaaccatctctaccggttcgctttcactggatatcgcgcttggggcaggtggtctgccgatgggccgtatcgtcgaaatctacggaccggaatcttccggtaaaaccacgctgacgctgcaggtgatcgccgcagcgcagcgtgaaggtaaaacctgtgcgtttatcgatgctgaacacgcgctggacccaatctacgcacgtaaactgggcgtcgatatcgacaacctgctgtgctcccagccggacaccggcgagcaggcactggaaatctgtgacgccctggcgcgttctggcgcagtagacgttatcgtcgttgactccgtggcggcactgacgccgaaagcggaaatcgaaggcgaaatcggcgactctcacatgggccttgcggcacgtatgatgagccaggcgatgcgtaagctggcgggtaacctgaagcagtccaacacgctgctgatcttcatcaaccagatccgtatgaaaattggtgtgatgttcggtaacccggaaaccactaccggtggtaacgcgctgaaattctacgcctctgttcgtctcgacatccgtcgtatcggcgcggtgaaagagggcgaaaacgtggtgggtagcgaaacccgcgtgaaagtggtgaagaacaaaatcgctgcgccgtttaaacaggctgaattccagatcctctacggcgaaggtatcaacttctacggcgaactggttgacctgggcgtaaaagagaagctgatcgagaaagcaggcgcgtggtacagctacaaaggtgagaagatcggtcagggtaaagcgaatgcgactgcctggctgaaagataacccggaaaccgcgaaagagatcgagaagaaagtacgtgagttgctgctgagcaacccgaactcaacgccggatttctctgtagatgatagcgaaggcgtagcagaaactaacgaagatttttaatcgtcttgtttgatacacaagggtcgcatctgcggcccttttgcttttttaagttgtaaggatatgccatgacagaatcaacatcccgtcg

SEQ ID NO: 919 - DNA, 23 bp, Artificial Sequence
  Synthetic DNA Sequence
  modified_base (3): i
  modified_base (6): i
  modified_base (12): i
  modified_base (15): i
  modified_base (18): i
ggnccngartcntmnggnaarac

SEQ ID NO: 920 - DNA, 23 bp, Artificial Sequence
  Synthetic DNA Sequence
  modified_base (3): i
  modified_base (9): i
  modified_base (12): i
  modified_base (15): i
  modified_base (18): i
  modified_base (20): i
tcnccvatntcnccntcnanytc

SEQ ID NO: 921 - DNA, 20 bp, Artificial Sequence
  Synthetic DNA Sequence
  modified_base (2): i
  modified_base (6): i
  modified_base (12): i
  modified_base (18): i
tnyrtngaygcngarcangc

SEQ ID NO: 922 - DNA, 23 bp, Artificial Sequence
  Synthetic DNA Sequence
  modified_base (9): i
  modified_base (12): i
  modified_base (15): i
  modified_base (18): i
  modified_base (21): i
taraayttnarngcnyknccncc

SEQ ID NO: 923 - DNA, 21 bp, Artificial Sequence
  Synthetic DNA Sequence
  modified_base (6): i
gacgcngccatcctgatgatc

SEQ ID NO: 924 - DNA, 21 bp, Artificial Sequence
  Synthetic DNA Sequence
acctcagtcgtcacgttggcg

SEQ ID NO: 925 - DNA, 20 bp, Artificial Sequence
  Synthetic DNA Sequence
aagcagatggttgtgtgctg

SEQ ID NO: 926 - DNA, 24 bp, Artificial Sequence
  Synthetic DNA Sequence
cagctgctcgtggtgcatctcgat

SEQ ID NO: 927 - DNA, 19 bp, Artificial Sequence
  Synthetic DNA Sequence
acgcggagaaggtgcgctt

SEQ ID NO: 928 - DNA, 22 bp, Artificial Sequence
  Synthetic DNA Sequence
ggtcgttcttcgagtcaccgca

SEQ ID NO: 929 - DNA, 448 bp, Bacteroides fragilis
  ref <308>: DATABASE ACCESSION NUMBER: ATCC 25285
ttcagcatgccatttcaaaacaggccgaagccgatatcgtgattatcgctgcttgtggggagcgtgcaaatgaagttgtggaaatctttaccgaatttccggaattggtggacccgcacacgggacgtaagctgatggagcgtaccattattatcgcaaatacatcgaacatgccggtagcagcgcgtgaagcttctgtgtatacggccatgacgattgccgaatactatcgtgccatgggattgaaagtcctgctgatggcagactccacttcccgttgggcgcaggcattgcgtgagatgtcgaaccgtatggaggagttgcccggaccggatgcattcccgatggacctgtcctcaatcatttctaacttctatggccgtgcaggctacgtgaaactgaataacggcgagagcggttctattacctttatcggtacagtatcacc

SEQ ID NO: 930 - DNA, 438 bp, Bacteroides distasonis
  ref <308>: DATABASE ACCESSION NUMBER: ATCC 8503
gctatctctaaacaagcggaagcggatatcgtgattatcgccgcctgcggtgagcgtgcgaatgaggtcgtagaggtatttacggagttcccggaattggtagacccgcatacgggacgtaaattgatggaacgtacgatcattatcgccaatacatccaacatgccggtagccgctcgtgaggcatccgtatatacggcgatgaccatcgccgagtattatcgcagcatgggtttgaaggttctgttgatggccgactctacttcccgctgggcacaggctttgcgtgagatgtccaaccgtttggaggagttgccgggaccggatgctttcccgatggacttgtccgctatcgtggcgaacttctacgctcgtgcgggattcgttcatttgaataacaacgctacaggctccgtcactttcatcggtacggtatcg

SEQ ID NO: 931 - DNA, 453 bp, Porphyromonas asaccharolytica
  ref <308>: DATABASE ACCESSION NUMBER: ATCC 25260
cctccagcacgctatctctaagcaggcggaggctgatatcgtcattatggcagcctgcggtgagcgtgctaatgaggtggtggagatctttgccgagttccctgagctcgaagacccacacacgggacgcaagctgatggagcgtacgatcatcatcgctaacacgagtaacatgccagtggctgctcgtgaggcttcggtctacaccgctatgaccatcgctgagtactaccgctcgatgggtctcaaagtactcctaatggctgactcgacctctcgctgggcacaggcactgcgtgagatgtctaaccgtctagaggagctgcctggaccagatgcattcccgatggacttgtcggctatcgtggcaaacttctacgctcgtgccggcttcgtctatctcaacaacggtgagacaggttctgtaaccttcatcggtacggtctctccagc

SEQ ID NO: 932 - DNA, 835 bp, Listeria monocytogenes
  ref <308>: DATABASE ACCESSION NUMBER: ATCC 15313
cggagctatcttagtagtatctgctgctgatggcccaatgccacaaactcgtgaacatatcttactttcacgtcaagttggtgttccatacatcgttgtattcatgaacaaatgtgacatggttgacgatgaagaattactagaattagttgaaatggaaattcgtgatctattaactgaatatgaattccctggcgatgacattcctgtaatcaaaggttcagctcttaaagcacttcaaggtgaagctgactgggaagctaaaattgacgagttaatggaagctgtagattcttacattccaactccwgaacgtgatactgacaaaccattcatgatgccagttgaggatgtattctcaatcactggtcgtggaacagttgcaactggacgtgttgaacgtggacaagttaaagttggtgacgaagtagaagttatcggtatcgaagaagaaagcaaaaaagtagtagtaactggagtagaaatgttccgtaaattactagactacgctgaagctggcgacaacattggcgcacttctacgtggtgttgctcgtgaagatatccaacrtggtcaagtattagctaaaccaggttcgattactccacacactaacttcaaagctgaaacttatgttttaactaaagaagaaggtggacgtcacactccattcttcaacaactaccgcccacaattctatttccgtactactgacgtaactggtattgttacacttccagaaggtactgaaatggtaaygcctggtgataacattgagcttgcagttgaactaattgcaccaatcgctatcgaagacggtactaaattctctatc

SEQ ID NO: 933 - DNA, 24 bp, Artificial Sequence
  Synthetic DNA Sequence
  modified_base (10): i
catcatcgtnttcmtgaacaartg

SEQ ID NO: 934 - DNA, 24 bp, Artificial Sequence
  Synthetic DNA Sequence
  modified_base (21): i
tcacgyttrrtaccacgcagnaga

SEQ ID NO: 935 - DNA, 23 bp, Artificial Sequence
  Synthetic DNA Sequence
  modified_base (3): i
  modified_base (9): i
  modified_base (15): i
ggnaarwsncarytntgycayac

SEQ ID NO: 936 - DNA, 20 bp, Artificial Sequence
  Synthetic DNA Sequence
  modified_base (3): i
  modified_base (5): i
  modified_base (9): i
  modified_base (12): i
  modified_base (18): i
tcnsnytcnggnarrcangg

SEQ ID NO: 937 - DNA, 23 bp, Artificial Sequence
  Synthetic DNA Sequence
  modified_base (3): i
  modified_base (6): i
  modified_base (12): i
  modified_base (18): i
atnacngargynttyggngartt

SEQ ID NO: 938 - DNA, 20 bp, Artificial Sequence
  Synthetic DNA Sequence
  modified_base (3): i
  modified_base (6): i
  modified_base (9): i
  modified_base (12): i
  modified_base (18): i
cyngtngynswngcrtgngc

SEQ ID NO: 939 - DNA, 1203 bp, Saccharomyces cerevisiae
atgtctcaagttcaagaacaacatatatcagagtcacagcttcagtacgggaacggttcgttgatgtccactgtaccagcagacctttcacagtcagtcgttgatggaaacggcaacggtagcagcgaagatattgaggccaccaacggctccggcgatggtggcggattgcaggagcaagcggaagcgcaaggtgaaatggaggatgaagcatacgatgaagctgccttaggttcgtttgtgccaatagaaaaactgcaagtgaacgggattactatggcggatgtgaaaaaactaagggagagtgggcttcacactgctgaagcggtagcatatgctcccagaaaggatttattggaaatcaaaggtatatcggaagctaaggcagataagttgctaaacgaagcggcaaggctagtgcctatgggatttgtcacggctgctgattttcatatgagaagatcggagctgatttgtttgacaacgggttctaagaatttggacactcttttgggtggtggtgtggaaactggttctattactgagcttttcggtgaattcaggacaggtaagtcccagctatgtcacactttggccgtgacatgccaaattccattggatattggtggcggtgaaggtaagtgtttgtatatcgataccgaaggtactttcaggccggtaagattggtatccatagctcagcggttcggattagacccggatgatgctttgaacaacgttgcgtatgcaagagcctataacgccgatcatcagttaagacttctggatgctgctgcccaaatgatgagcgagtctcggttttccttgattgtggtcgattctgttatggctctataccgtacggatttttctggtcgtggtgaactaagcgcaaggcaaatgcatttagccaaatttatgcgtgctttgcaaaggctggccgaccaatttggtgttgcagtcgtcgttactaaccaagtggtcgcccaagttgatggtggtatggcttttaatccagatccaaagaagcctatcggtggtaatattatggcacattcttccaccacgcgattaggtttcaaaaagggtaagggatgtcaaagattatgcaaagttgttgactcaccttgcttaccagaggctgaatgtgtgttcgcgatctatgaagatggtgttggtgaccccagagaagaagacgagtag

SEQ ID NO: 940 - DNA, 1800 bp, Saccharomyces cerevisiae
  strain GRF88
cgatccaattgctggtcttaagatgcatttgattgatctaggtattgccactgaagctgaagtcaaagcttacgacaagtccgctagaaaatacgttgacgaacaagttgaattagctgatgctgctcctcctccagaagccaaattatccatcttgtttgaagacgtctacgtgaaaggtacagaaactccaaccctaagaggtaggatccctgaagatacttgggacttcaaaaagcaaggttttgcctctagggattaattaaatcgtaaggaaaaataaaataatagtgctgtgatcgcatgatattcttccctggaagcgccattttatagcaagaaatgtaagtcaagtatattttaactgtatatacaacaatatgactcttttttatgccttgttgtttttcttcgggttttcccacacattgtgtggagagatagttattaacagaccgaaaatagccgcccaaggataaacttttatataaagggaagggtagttgacccaaaaatttggattctactttccagatttactttcacccttttatatttgctgtagtctgttatgccaatcaggaaagcatttgaacaaatatgtctgttacaggaactgagatcgatagtgatacagcaaaaaatattcttagtgtagatgaattacagaactatggtattaatgcctcagatcttcaaaaattgaagtctggtgggatatacacagtcaatgtatgttataataacatttttaaaacctctgctgtagaggttctttccccctttcttttactaactaataatttggaaaggaacttttatagaccgttttgtcaacaacaagaagacatctatgtaaaattaaagggttaagtgaggtgaaagtggaaaaaattaaagaagctgctggaaaaatcatacaggtgggatttatccccgctactgtacaattagatataagacagcgtgtgtactccttatcaactggatctaagcaactagattcaatcctaggtggtggaataatgacaatgagtatcactgaagtatttggtgaatttaggtgtggtaagacacagatgtctcatactttgtgtgttaccacgcagcttccgagggaaatgggtggtggtgaagggaaagtagcatatattgatacagaaggcactttcaggcccgagaggattaagcaaattgcagaaggttatgaattggatcccgagtcatgtttggcaaacgtttcatatgctagagccttgaatagtgaacatcaaatggaacttgttgaacaattgggtgaagaacttagttctggagattatcgccttatcgtggtagattctataatggcaaacttcagagtagactactgcggtagaggtgaactaagcgaaagacagcaaaagctaaatcaacatcttttcaaattgaatagattggcagaggaatttaatgttgcagtatttctgacaaaccaagttcaatcagacccaggtgcttctgcattatttgcctcggcagatggtaggaaaccaattggagggcacgttctggcacatgcgtcagcaacaaggattttgttgagaaaagggcgtggtgacgaaagagttgccaagttacaagattccccagatatgcctgaaaaagaatgtgtctacgtaattggtgaaaaaggtattaccgattcaagtgactagtttttgtatacttttttaatgaagatgacattgctcctttattaaacttttcttttactttgtgttactaatattattaatatcttgttatgattctttgttt

SEQ ID NO: 941 - DNA, 430 bp, Cryptococcus humicolus
  ref <308>: DATABASE ACCESSION NUMBER: ATCC 38294
cgtccttatccaggagctcattaacaacattgccaaggcccacggtggtttctccgtcttcaccggtgtcggtgagcgtacccgtgagggtaacgacctgtaccacgagatgcgtgagactggtgtcatcaacctcgagggcgactccaaggtcgctctcgtcttcggccagatgaacgagccccccggagcccgtgcccgtgtcgcccttaccggcctcaccatcgccgagtacttccgtgacgaggagggtcaggacgtgcttctcttcatcgacaacattttccgtttcacccaggccggttccgaggtgtctgcccttctcggtcgtatcccctcggccgtcggttaccagcccaccctcgctaccgacatgggttccatgcaggagcgtatcaccaccaccaagaagggttcgattacctccgtc

SEQ ID NO: 942 - DNA, 794 bp, Escherichia coli
  ref <308>: DATABASE ACCESSION NUMBER: ATCC 43895
cgtgtacgatgctcttgaggtgcaaaatggtaatgagcgtctggtgctggaagttcagcagcagctcggcggcggtatcgtgcgtaccatcgcaatgggttcctccgacggtctgcgtcgcggtctggatgtaaaagacctcgaacacccgatcgaagtcccggtaggtaaagcgactctgggccgtatcatgaacgtactgggtgaaccggtcgacatgaaaggcgagatcggtgaagaagagcgttgggcgattcaccgcgcagcaccttcctacgaagagctgtcaaactctcaggaactgctggaaaccggtatcaaagttatcgacctgatgtgtccgttcgctaagggcggtaaagttggtctgttcggtggtgcgggtgtaggtaaaaccgtaaacatgatggagctcattcgtaacatcgcgatcgagcactccggttactctgtgtttgcgggcgtaggtgaacgtactcgtgaggggaacgacttctaccacgaaatgaccgactccaacgttatcgataaagtatccctggtgtatggccagatgaacgagccgccgggaaaccgtctgcgcgtagctctgaccggtctgaccatggctgagaaattccgtgacgaaggtcgtgacgttctgctgttcgttgacaacatctatcgttacaccctggccggtacggaagtatccgcactgctgggccgtatgccttcagcggtaggttatcagccgaccctggcggaagagatgggcgttctgcaggaacgtatcacctccaccaaaaccggtt

SEQ ID NO: 943 - DNA, 814 bp, Escherichia coli
  ref <308>: DATABASE ACCESSION NUMBER: ATCC 35401
atgccgtaccgcgcgtgtacgatgctcttgaggtgcaaaatggtaatgagcgtctggtgctggaagttcagcagcagctcggcggcggtatcgtacgtaccatcgcaatgggttcctccgacggtctgcgtcgcggtctggatgtaaaagacctcgaacacccgattgaagtcccggtaggtaaagcgactctgggccgtatcatgaacgtactgggtgaaccggtcgacatgaaaggcgagatcggtgaagaagagcgttgggcgattcaccgcgcagcaccttcctacgaagagctgtcaaactctcaggaactgctggaaaccggtatcaaagttatcgacctgatgtgtccgttcgctaagggcggtaaagttggtctgttcggtggtgcgggtgtaggtaaaaccgtaaacatgatggagctcattcgtaacatcgcgatcgagcactccggttactctgtgtttgcgggcgtaggtgaacgtactcgtgagggtaacgacttctaccacgaaatgaccgactccaacgttatcgacaaagtatccctggtgtatggccagatgaacgagccgccgggaaaccgtctgcgcgttgctctgaccggtctgaccatggctgagaaattccgtgacgaaggtcgtgacgttctgctgttcgttgacaacatctatcgttacaccctggccggtacggaagtatccgcactgctgggccgtatgccttcagcggtaggttatcagccgaccctggcggaagagatgggcgttctgcaggaacgtatcacctccaccaaaactggttctatcac

SEQ ID NO: 944 - DNA, 798 bp, Escherichia coli
  ref <308>: DATABASE ACCESSION NUMBER: ATCC 11775
gtgtacgatgctcttgaggtgcaaaatggtaatgagcgtctggtgctggaagttcagcagcagctcggcggcggtatcgtgcgtaccatcgcaatgggttcctccgacggtctgcgtcgcggtctggatgtaaaagacctcgaacacccgatcgaagtcccggtaggtaaagcgactctgggccgtatcatgaacgtactgggtgaaccggtcgacatgaaaggcgagatcggtgaagaagagcgttgggcgattcaccgcgcagcaccttcctacgaagagctgtcaaactctcaggaactgctggaaaccggtatcaaagttatcgacctgatgtgtccgttcgctaagggcggtaaagttggtctgttcggtggtgcgggtgtaggtaaaaccgtaaacatgatggagcttattcgtaacatcgcgatcgagcactccggttactctgtgtttgcgggcgtaggtgaacgtactcgtgagggtaacgacttctaccacgaaatgaccgactccaacgttatcgacaaagtatccctggtgtatggccagatgaacgagccgccgggaaaccgtctgcgcgttgctctgaccggtctgaccatggctgagaaattccgtgacgaaggtcgtgacgttctgctgttcgttgacaacatctatcgttacaccctggccggtacggaagtatccgcactgctgggccgtatgccttcagcggtaggttatcagccgaccctggcggaagagatgggcgttctgcaggaacgtatcacctccaccaaaaccggttctatc

SEQ ID NO: 945 - DNA, 812 bp, Escherichia coli
  ref <308>: DATABASE ACCESSION NUMBER: ATCC 25922
atgccgtaccgcgcgtgtacgatgctcttgaggtgcaaaatggtaatgagcgtctggtgctggaagttcagcagcagctcggcggcggtatcgtgcgtaccatcgcaatgggttcctccgacggtctgcgtcgcggtctggatgtaaaagacctcgaacacccgatcgaagtcccggtaggtaaagcgactctgggccgtatcatgaacgtactgggtgaaccggtcgacatgaaaggcgagatcggtgaagaagagcgttgggcgattcaccgcgcagcaccttcctacgaagagctgtcaaactctcaggaactgctggaaaccggtatcaaagttatcgacctgatgtgtccgttcgctaagggcggtaaagttggtctgttcggtggtgcgggtgtaggtaaaaccgtaaacatgatggagcttattcgtaacatcgcgatcgagcactccggttactctgtgtttgcgggcgtaggtgaacgtactcgtgagggtaacgacttctaccacgaaatgaccgactccaacgttatcgacaaagtatccttggtgtatggccagatgaacgagccgccgggaaaccgtctgcgcgttgctctgaccggtctgaccatggctgagaaattccgtgacgaaggtcgtgacgtattgctgttcgtcgataacatctatcgttacaccctggccggtaccgaagtatccgcactgctgggccgtatgccttcagcggtaggttatcagccgaccctggcggaagagatgggcgttctgcaggaacgtatcacctccaccaaaaccggttctatc

SEQ ID NO: 946 - DNA, 832 bp, Neisseria polysaccharea
  ref <308>: DATABASE ACCESSION NUMBER: ATCC 43768
gcgacgctatcccgcatgtttacgatgccctgaaattggacgagaacggtctgactctggaagttcaacaacttctgggtgacggcgttgtccgtactattgcaatgggtagttcagacggcctgaaacgcggcatgtctgtaagcaatactggtgcgccaatcactgtgccggtaggtaaaggtactttgggtcgtattgtcgacgtattgggtacgcctgttgatgaagcaggtccgatcgataccgacaagagccgtgccattcaccaaactgctccgaaattcgacgagttgtctgcaactaccgaattgttggaaaccggtattaaagtgatcgacttgctgtgtccgtttgctaaaggcggtaaagtaggtctgttcggtggtgccggtgtaggcaaaaccgtgaacatgatggaattgatcaacaacatcgccaaagcgcacagcggtctgtccgtgttcgcaggtgtgggcgagcgtacccgtgaaggtaacgacttctaccacgagatgaaagattccaacgtattggataaagtggcaatggtttacggtcagatgaacgaacctccgggcaaccgtttgcgcgtcgcattgaccggtttgaccatggcggaatacttccgtgacgaaaaagacgaaaacggtaaaggtcgcgacgtattgttcttcgttgacaacatctaccgttacactctggccggtaccgaagtatctgcactgttgggccgtatgccttctgcagtgggttaccaaccgacattggctgaagaaatgggtcgtttgcaagagcgtattacctctacccaaaccggttccattacttc

SEQ ID NO: 947 - DNA, 840 bp, Neisseria sicca
  ref <308>: DATABASE ACCESSION NUMBER: ATCC 9913
tccgcgcgatgccattccgcatgtttacgacgccctgaaattggatgcaaacggcctgactttggaagtacaacagcttctgggcgacggcgtggttcgtactattgcaatgggtagttcggacggtctgaaacgcggcatgactgtaagcaatacagatgcgccgattactgtgccggtaggtaaaggtactttgggacgtattgtcgatgtgttgggtacacctgttgatgaagcaggtccgattgataccgacaaacaccgtgctatccatcagacagctccgaaattcgatgagttgtctgctactaccgagctgctggaaacaggcattaaagtgattgacttgctgtgtccgtttgccaaaggcggtaaagtaggtctgttcggtggtgccggtgtaggcaaaaccgtcaacatgatggaattgattaacaacatcgccaaagcgcatagtggtttgtccgtgttcgccggtgtgggggaacgtacccgtgaaggtaacgacttctaccacgagatgaaagattccaacgtattggacaaagtggcgatggtttacggtcagatgaacgaacctccgggtaaccgtctgcgtgtagccttgaccggtttgacgatggccgaatacttccgtgatgaaaaagacgaaagcggcaaaggtcgcgacgtattgttcttcgtggacaacatttaccgttacactctggccggtacagaagtatccgcattgctcggtcgtatgccttcagcagtaggttaccaaccgacattggctgaagaaatgggtcgtctgcaagagcgtattaccctctactcaaacaggctccattacttcta

SEQ ID NO: 948 - DNA, 843 bp, Streptococcus mitis
  ref <308>: DATABASE ACCESSION NUMBER: ATCC 903
gcagctggcgacaagctacctgagatcaataatgcacttgtagtctataaaaatgacgaaaaaaaatcaaaaatcgtccttgaagtagctcttgagcttggtgatggagtggttcggaccatcgctatggaatcaacggatgggttgactcgtggcatggaagtgctagatactggccgtccaatttctgtgccagtcggcaaagaaacacttggtcgcgtctttaacgttttgggagataccattgacttggatgctccttttgcggatgatgcagagcgccagccaatccataagaaagctccaacctttgatgagttgtctacttcttcagagatcttagagacaggtatcaaggttatcgacctgttagccccttatctgaaaggtggtaaagttggactcttcggtggtgccggagttggtaagaccgtcctgattcaagaattgatccacaacattgcccaagaacacggtggtatttctgtatttactggcgttggggaacgtacccgtgaagggaatgacctttattgggaaatgaaagagtctggtgttatcgagaaaacagccatggtcttcggtcagatgaatgagccgccaggagcgcgtatgcgggttgctttgactggtttgacgattgcagaatacttccgtgatgtggaaggtcaagatgtcttgctcttcattgacaacatcttccgtttcacgcaggcaggttctgaagtttctgcccttttgggtcggatgccgtcagccgttggttaccaaccaacacttgcgacagaaatggggcaattgcaagagcgtatcacatcgactaagaagggttctgtaacctct

SEQ ID NO: 949 - DNA, 841 bp, Streptococcus mitis
  ref <308>: DATABASE ACCESSION NUMBER: ATCC 49456
gcagcaggggaaaaacttcctgagattaacaatgcacttgtcgtctacaaaaatgacgaaagaaaaacaaaaatcgtccttgaagtagccttggagttgggagatggtatggtccgtactatcgccatggaatcaacagatggtttgactcgtggaatggaagtattggacacaggtcgtccaatctctgtaccagtaggtaaagaaactttgggacgtgtcttcaatgttttgggagataccattgacttggaagctccttttacagaagatgcagagcgtcagccaattcataaaaaagctccaacttttgatgaattgtctacctcttctgaaatccttgaaacagggattaaggttatcgaccttcttgccccttaccttaaaggtggtaaggttggacttttcggtggtgccggagttggtaaaaccgtcttaatccaagaattgattcacaacattgcccaagaacacggtggtatttcagtatttaccggtgttggggaacgtactcgtgagggtaatgacctttactgggaaatgaaagaatcaggtgttatcgagaaaacagccatggtatttggtcagatgaatgagccgccaggagcacgtatgcgtgttgccctaactggtttgacaatcgccgaatacttccgtgatgtggaaggccaagacgtgcttctctttatcgataatatcttccgtttcactcaggctggttcagaagtatctgcccttttgggtcgtatgccatcagccgttggttaccaaccaacacttgctacggaaatgggtcaattgcaagagcgtattacatcaactaaaaagggttctgtaacct

SEQ ID NO: 950 - DNA, 827 bp, Streptococcus mitis
  strain LSPQ 2583
gctacctgagatcaataatgcacttgtagtctataaaaatgacgaaaataaatcaaaaatcgtccttgaagtagctcttgagcttggtgatggagtggttcggaccatcgctatggaatcaacggatgggttgactcgtggcatggaagtgctagatactggtcgtccaatttctgtgccagtcggcaaagaaacacttggtcgcgtctttaacgttttgggagataccattgacttggatgctccttttgcggatgatgcagagcgccagccaatccataagaaagctccaacctttgatgagttgtctacttcatcagagatcttagagacaggtatcaaggttatcgacctgttagcaccttatctgaaaggtggtaaagtcggactcttcggtggtgccggagttggtaagaccgtcctgattcaggaattgatccacaacattgcccaagagcatggtggtatttccgtgtttaccggtgttggggaacgtacccgtgaagggaatgacctttactgggaaatgaaggagtctggcgttatcgagaaaacagccatggtcttcggtcagatgaatgagccaccaggagcgcgtatgcgggttgctttgactggtttgacgattgcagagtacttccgtgatgtagaaggtcaagatgtcttgctcttcattgacaacatcttccgtttcacgcaggcaggttctgaagtctctgcccttttgggtcggatgccatcagccgttggttaccaaccaacacttgcgactgaaatgggacaactccaagagcgtattacatcgactaagaaaggttctgtaactt

SEQ ID NO: 951 - DNA, 844 bp, Streptococcus oralis
  ref <308>: DATABASE ACCESSION NUMBER: ATCC 35037
gcagcaggggaaacacttcctgagattaataatgcacttgtcgtctacaaaaatgacgaaagaaaaacaaaaatcgtccttgaagtagccttggagttgggtgatggtatggtccgtacgatcgccatggaatcaacagatggtttgactcgtggaatggaagttttggacacaggccgtccaatctctgtaccagtaggtaaagaaactttgggacgtgtcttcaacgttttgggagatactattgacttggatgctcctttcgctgaagacgctgagcgtcagccaattcataagaaagctccaacttttgatgaattgtctacctcatctgaaatcttggaaacagggattaaggttatcgaccttcttgccccttaccttaaaggtgggaaagttggactcttcggtggtgccggagttggtaaaactgtcttgatccaagagttgattcacaacattgcccaagaacatggtggtatttcagtatttaccggtgttggagaacgtacccgtgaggggaacgacctttactgggaaatgaaagaatcaggcgttatcgagaaaacagccatggtatttggtcagatgaatgagccacctggagcacgtatgcgtgttgctcttactggtttgacaatcgccgaatacttccgtgatgtagaaggccaagatgtgcttctctttatcgacaatatcttccgtttcactcaagctggttcagaagtatctgcccttttgggtcggatgccttcagccgttggttaccaaccaacacttgctacggaaatgggtcaattgcaagaacgtatcacatcaactaagaagggttctgtaacctcta

SEQ ID NO: 952 - DNA, 830 bp, Streptococcus pneumoniae
  strain StrR-06
gcagcaggggaaaaacttcctgagattaacaatgcacttgtcgtctacaaaaatgacgaaagaaaaacaaaaatcgtccttgaagtagccttggagttaggagatggtatggttcgtactatcgccatggaatcaacagatgggttgactcgtggaatggaagtattggacacaggtcgtccaatctctgtaccagtaggtaaagaaactttgggacgtgtcttcaacgttttgggagataccattgatttggaagctccttttacagaagacgcagagcgtcagccaattcataaaaaagctccaacttttgatgagttgtctacctcttctgaaatccttgaaacagggatcaaggttattgaccttcttgccccttaccttaaaggtggtaaagttggacttttcggtggtgccggagttggtaaaaccgtcttaatccaagaattgattcacaacattgcccaagagcacggtggtatttcagtatttactggtgttggggaacgtactcgtgaggggaatgacctttactgggaaatgaaagaatcaggcgttatcgagaaaacagccatggtctttggtcagatgaatgagccaccaggagcacgtatgcgtgttgcccttactggtttgacaatcgctgaatacttccgtgatgtggaaggccaagacgtgcttctctttatcgataatatcttccgtttcactcaggctggttcagaagtatctgcccttttgggtcgtatgccatcagccgttggttaccaaccaacacttgctacggaaatgggtcaattgcaagaacgtatcacatcaaccaagaaggg

SEQ ID NO: 953 - DNA, 823 bp, Streptococcus pneumoniae
  strain StrR-11
aaaaacttcctgagattaacaatgcacttgtcgtctacaaaaatgacgaaagaaaaacaaaaatcgtccttgaagtagccttggagttaggagatggtatggttcgtactatcgccatggaatcaacagatgggttgactcgtggaatggaagtattggacacaggtcgtccaatctctgtaccagtaggtaaagaaactttgggacgtgtcttcaacgttttgggagataccattgatttggaagctccttttacagaagacgcagagcgtcagccaattcataaaaaagctccaacttttgatgagttgtctacctcttctgaaatccttgaaacagggatcaaggttattgaccttcttgccccttaccttaaaggtggtaaagttggacttttcggtggtgccggagttggtaaaaccgtcttaatccaagaattgattcacaacattgcccaagagcacggtggtatttcagtatttactggtgttggggaacgtactcgtgaggggaatgacctttactgggaaatgaaagaatcaggcgttatcgagaaaacagccatggtctttggtcagatgaatgagccaccaggagcacgtatgcgtgttgcccttactggtttgacaatcgctgaatacttccgtgatgtggaaggccaagacgtgcttctctttatcgataatatcttccgtttcactcaggctggttcagaagtatctgcccttttgggtcgtatgccatcagccgttggttaccaaccaacacttgctacggaaatgggtcaattgcaagaacgtatcacatcaactaagaagggttc

SEQ ID NO: 954 - DNA, 844 bp, Streptococcus pneumoniae
  strain StrR-55
gcagcaggggaaaaacttcctgagattaacaatgcacttgtcgtctacaaaaatgacgaaagaaaaacaaaaatcgtccttgaagtagccttggagttaggagatggtatggttcgtactatcgccatggaatcaacagatgggttgactcgtggaatggaagtattggacacaggtcgtccaatctctgtaccagtaggtaaagaaactttgggacgtgtcttcaacgttttgggagataccattgacttggaagctccttttacagaagacgcagagcgtcagccaattcataaaaaagctccaacttttgatgagttgtctacctcttctgaaatccttgaaacagggatcaaggttattgaccttcttgccccttaccttaaaggtggtaaagttggacttttcggtggtgccggagttggtaaaactgtcttaatccaagaattgattcacaacattgcccaagagcacggtggtatttcagtatttgctggtgttggggaacgtactcgtgaggggaatgacctttactgggaaatgaaagaatcaggcgttatcgagaaaacagccatggtctttggtcagatgaatgagccaccaggagcacgtatgcgtgttgcccttactggtttgacaatcgctgaatacttccgtgatgtggaaggccaagacgtgcttctctttatcgataatatcttccgtttcactcaggctggttcagaagtatctgcccttttgggtcgtatgccatcagccgttggttaccaaccaacacttgctacggaaatgggtcaattgcaagaacgtatcacatcaaccaagaagggttctgtaacctcta

SEQ ID NO: 955 - DNA, 834 bp, Streptococcus pneumoniae
  strain StrR-05
aaaaacttcctgagattaacaatgcacttgtcgtctacaaaaatgacgaaagaaaaacaaaaatcgtccttgaagtagccttggagttaggagatggtatggttcgtactatcgccatggaatcaacagatgggttgactcgtggaatggaagtattggacacaggtcgtccaatctctgtaccagtaggtaaagaaactttgggacgtgtcttcaacgttttgggagataccattgatttggaagctccttttacagaagacgcagagcgtcagccaattcataaaaaagctccaacttttgatgagttgtctacctcttctgaaatccttgaaacagggatcaaggttattgaccttcttgccccttaccttaaaggtggtaaagttggacttttcggtggtgccggagttggtaaaaccgtcttaatccaagaattgattcacaacattgcccaagagcacggtggtatttcagtatttactggtgttggggaacgtactcgtgaggggaatgacctttactgggaaatgaaagaatcaggcgttatcgagaaaacagccatggtctttggtcagatgaatgagccaccaggagcacgtatgcgtgttgcccttactggtttgacaatcgctgaatacttccgtgatgtggaaggccaagacgtgcttctctttatcgataatatcttccgtttcactcaggctggttcagaagtatctgcccttttgggtcgtatgccatcagccgttggttaccaaccaacacttgctacggaaatgggtcaattgcaagaacgtatcacatcaaccaagaagggttctgtaacctcta

SEQ ID NO: 956 - DNA, 495 bp, Babesia microtti
  strain Persing-1
ttgtatatcacaggcactcagcaaatattccgatactgacgtaattatatacgtgggttgtggtgaacgtgggaatgaaatggctgagattctatgcgaattccctgaactatctactgtagttaatgatgaaaaggtggccattatggaacgtacatgcttagttgccaatacttctaatatgccagtggccgctagagaagctagtatatacactggtattacaattgctgaatatttccgtgatatgggttacaactgcactcttatggccgattccactagccgatgggcagaggctctaagggaaatttctggtagattggctgaaatgcctgcagattctggctatccggcctatttatcgtcaaggttgtcagctttttatgaacgtgcaggtgggataactgtctaattaatttaggcttgattaagtgcttaggttcaccaacacgaaccggatctattacggttgtaggagcagtttctccacca

SEQ ID NO: 957 - DNA, 469 bp, Entamoeba histolytica
  strain HM1-1MSS
agttatttcacaagcattaagtaaatatagtaattcagatgttattatttatgtaggatgtggtgaacgaggaaatgaaatggcagaagttcttcgagattttccagctctttctattaaagtaggagataaagaagaatctattatgacaagaacagcacttgttgctaatacatctaatatgcctgttgcagcacgtgaagcatcaatttatactggaattacattatcagaatattatagagatatgggatataatgttgctatgatggcagattcaacatcaagatgggctgaagcacttagagaaatttcaggacgtcttgcagaaatgccagctgattctggatatccagcatatcttgcagcacgtttagcatcattttatgaacgtgcaggtatggttgaatgtttaggatcaccaaaaagaatagggtcagtttctattgtaggagctgtttcaccacct

SEQ ID NO: 958 - DNA, 452 bp, Fusobacterium nucleatum subsp. polymorphum
  ref <308>: DATABASE ACCESSION NUMBER: ATCC 10953
tacaacaccaacttgctaaatgggcagatgcagaagtagttgtttatgttggttgtggggaacgtggaaatgaaatgaccgatgtacttatggaattcccagaaattattgaccctaagacaggacaatctttaatgaagagaacagttcttatagctaatacttctaatatgccagttgctgctcgtgaggcttcaatctatactggtataactattgcagaatattttagagatatgggatattcagtggcacttatggcagattcaacaagtcgttgggcagaagcacttcgtgaaatgtcaggacgtttggaagaaatgccaggtgatgaaggatatccagcatatctatcaagtagaatagcagagttttatgaaagagcagggcttgttgaatgtctaggtaatggagaagaaggagcattaactgtaattggagcagtatctcca

SEQ ID NO: 959 - DNA, 469 bp, Leishmania aethiopica
  ref <308>: DATABASE ACCESSION NUMBER: ATCC 50119
tgtaattagtcaggccctctccaagtactccaactccgactgcgtcatctatgtcggctgcggcgagcgcggtaatgagatggccgaggtgctcatggagttcccgaccctgacgaccgtgatcaatggtcgcgaggagtcgatcatgaagcgcacctgcctcgtggcgaacacttcgaacatgccagtcgcagcccgtgaggcctctatttacaccggcatcaccctggccgagtactaccgtgatatgggcaagcatatcgccatgatggccgactcgacgtctcgctgggccgaggcgcttcgtgagatttcgggtcgtctggcggagatgccggccgatggtggctaccctgcctatctcagcgctcgtctcgcctccttctacgagcgcgccggcctcgtcacctgcatcggcgggccgaagcgccagggctccgtcacgattgtcggtgccgtgtctccgccg

SEQ ID NO: 960 - DNA, 469 bp, Leishmania tropica
  ref <308>: DATABASE ACCESSION NUMBER: ATCC 30815
tgtaattagtcaggccctctccaagtactccaactccgactgcgtcatctatgtcggctgcggcgagcgcggtaatgagatggccgaggtgctcatggagttcccgaccctgacgaccgtgatcgatggtcgcgaggagtcgatcatgaagcgcacctgcctcgtggcgaacacttcgaacatgccagtcgcagcccgtgaggcctctatttacaccggcatcaccctggccgagtactaccgtgatatgggcaagcatatcgccatgatggccgactcgacgtctcgctgggccgaggcgcttcgtgagatttcgggtcgtttggcggagatgccggccgatggtggctaccctgcctatctcagcgctcgtctcgcctccttctacgagcgcgccggcctcgtcacctgcatcggcgggccgaagcgccagggctccgtcacgattgtcggtgccgtgtctccgccg

SEQ ID NO: 961 - DNA, 469 bp, Leishmania guyanensis
  ref <308>: DATABASE ACCESSION NUMBER: ATCC 50126
tgtcatcagtcaggccctctccaagtactccaactcggactgtgtcatctatgtcggctgcggtgaacgcggtaacgagatggccgaggtgctcatggagttcccgaccctgacgactgtgatcgatggtcgcgaagagtccatcatgaagcgcacctgcctcgtggcgaacacctcgaacatgcccgtcgcagcccgtgaggcctctatttataccggcatcacccttgctgagtactaccgtgatatgggcaagcacattgccatgatggccgactcgacgtctcgctgggccgaggcgctgcgtgagatttcgggtcgattggcggagatgccggctgatggtggctaccctgcctacctcagcgcccgcctcgcctccttctacgagcgcgccggtctcgtcacctgcatcggcgggccgaagcgccagggctccgtcacgatcgtcggtgcagtgtctccaccg

SEQ ID NO: 962 - DNA, 469 bp, Leishmania donovani
  ref <308>: DATABASE ACCESSION NUMBER: ATCC 50212
tgtcattagtcaggccctctccaagtactccaactccgattgcgtcatctatgtcggctgcggcgagcgcggtaatgagatggccgaggtgctcatggagttcccgaccctgacgaccgtgatcgatggccgcgaggagtcgatcatgaagcgcacctgcctcgtggcgaacacctcgaacatgccagtcgcagcccgtgaggcctctatttacaccggcatcaccctggccgagtactaccgtgatatgggcaagcatatcgccatgatggctgactcgacgtctcgctgggccgaggcgcttcgtgagatttcgggtcgtctggcggagatgccggccgatggtggctaccccgcctacctcagcgctcgtctcgcctccttctacgagcgcgccggcctcgtcacctgcatcggcgggccgaagcgccagggctccgtcacgatcgtcggtgccgtgtctccaccg

SEQ ID NO: 963 - DNA, 469 bp, Leishmania hertigi
  ref <308>: DATABASE ACCESSION NUMBER: ATCC 50125
tgtgatcagtcaggccctttccaagtactccaactcggactgcgtcatctacgtcggctgtggtgagcgcgggaacgagatggccgaggtgctcatggatttcccgactttgacgactgtgatcgatggtcgcgaggagtccatcatgaagcgcacctgcctcgtggcgaacacctccaacatgccagttgcagcccgtgaggcttctatctataccggcatcacactggctgagtactatcgtgatatgggcaagcacattgccatgatggccgactcgacgtctcgctgggccgaggcgttgcgtgagatttccggtcggctggcggagatgccggccgatggtggttaccccgcctacctcagtgcccgtctcgcctccttctacgagcgcgctggcctcgtgacctgtatcggcgggccgaagcgccagggctccgtcacaattgttggtgcggtgtctccaccg

SEQ ID NO: 964 - DNA, 469 bp, Leishmania mexicana
  ref <308>: DATABASE ACCESSION NUMBER: ATCC 50156
ggtcattagtcaggccctttccaagtactccaactctgactgcgtcatctacgtcggctgcggcgagcgcggtaatgagatggccgaggtgctcatggagttcccgaccctgacgaccatgatcgatggtcgggaggagtcgatcatgaagcgcacctgcctcgtggcgaacacctcgaacatgcccgtcgcagcccgtgaggcctctatctacaccggcatcaccctcgccgagtactaccgtgatatgggcaagcatatcgccatgatggccgactcgacgtctcgctgggctgaggcgcttcgtgagatttcgggtcgtctggcggagatgccggccgatggtggctaccccgcctacctcagcgctcgtctcgcctccttctacgagcgcgccggcctcgtcacctgcatcggcgggccgaagcgccagggctccgtcacgatcgtcggtgccgtgtctccgccg

SEQ ID NO: 965 - DNA, 469 bp, Leishmania tropica; identical to SEQ ID NO: 960
  ref <308>: DATABASE ACCESSION NUMBER: ATCC 50129

SEQ ID NO: 966 - DNA, 449 bp, Peptostreptococcus anaerobius
  ref <308>: DATABASE ACCESSION NUMBER: ATCC 27337
caccagttcgccaagtgggcagatgctcagatagttgtatacgttggttgtggagaacgtggtaacgagatgacagacgttctaaatgaattcccagaactgattgaccctcatacaggcgaatctctaatgaagagaacagttcttatagctaatacgtcaaatatgccagttgcagccagagaggcaagtatatatacaggtattacaatagctgaatattttagagacatgggatattcagtagcggtaatggccgactctacatcaagatgggcagaggccctaagagagatgtcaggtcgtctagaagaaatgcctggtgatgaaggttatccagcctatctaggttctagagctgcagagttctatgaaagagcaggtaaggtaatatgtaagggtagcgataatagagagggagcccttacaataataggtgccgtgtcacc

SEQ ID NO: 967 - DNA, 826 bp, Bordetella pertussis
  ref <308>: DATABASE ACCESSION NUMBER: ATCC 9797
ctggtggtgtcggccgcagacggcccgatgccgcagacgcgcgagcacattttgctgtcgcgccaggttggcgtgccgtacatcatcgtgttcctgaacaaggcggacatggttgatgacgcggagctgctcgagctggtgaagatggaagtccgcgaactgctgagcaagtacgatttcccgggcgatgacacgccgatcgtgaagggttcggccaagctggcgctggaaggcgacaagggcgaactgggcgagcaggcgattctgtcgctggcgcaagcgctggacacgtacattccgacgccggagcgcgcggtcgacggtgcgttcctgatgccggtggaagacgtgttctcgatctcgggccgtggcacggtggtgactggccgtatcgagcgcggcgtggtgaaggttggcgaggaaatcgaaatcgtgggcatcaagccgacggtgaagacgacctgcacgggcgtggagatgttccgcaagctgctggaccagggccaggcgggcgacaacgtgggtatcttgctgcgcggcaccaagcgtgaagacgtcgagcgtggccaggtgctggccaagccgggttcgatcaacccgcacacggacttcacggccgaggtgtacattctgtccaaggaagagggtggccgtcacacgccgttcttcaacggctatcgtccgcagttctacttccgcacgacggacgtgaccggcacgatcgacctgccggcggacaaggaaatggtgctgccgggcgacaacgtgtcgatgaccgtcaagctgctggccccgatcgccatggaagaaggtctgcgtttcgcca

SEQ ID NO: 968 - DNA, 817 bp, Bordetella pertussis
  strain BD180
cgatcctggtggtgtcggccgcagacggcccgatgccgcagacgcgcgagcacattttgctgtcgcgccaggttggcgtgccgtacatcatcgtgttcctgaacaaggcggacatggttgatgacgcggagctgctcgagctggtggagatggaagtccgcgaactgctgagcaagtacgatttcccgggcgatgacacgccgatcgtgaagggttcggccaagctggcgctggaaggcgacaagggcgaactgggcgagcaggcgattctgtcgctggcgcaagcgctggacacgtacattccgacgccggagcgcgcggtcgacggtgcgttcctgatgccggtggaagacgtgttctcgatctcgggccgtggcacggtggtgactggccgtatcgagcgcggcgtggtgaaggttggcgaggaaatcgaaatcgtgggcatcaagccgacggtgaagacgacctgcacgggcgtggagatgttccgcaagctgctggaccagggccaggcgggcgacaacgtgggtatcttgctgcgcggcaccaagcgtgaagacgtcgagcgtggccaggtgctggccaagccgggttcgatcaacccgcacacggacttcacggccgaggtgtacattctgtccaaggaagagggtggccgtcacacgccgttcttcaacggctatcgtccgcagttctacttccgcacgacggacgtgaccggcacgatcgacctgccggcggacaaggaaatggtgctgccgggcgacaacgtgtcgatgaccgtcaagctgctggccccgatcgccatggaagaagg

SEQ ID NO: 969 - DNA, 637 bp, Enterococcus columbae
  ref <308>: DATABASE ACCESSION NUMBER: ATCC 51263
cctatgccacaaactcgtgaacacattcttttatcacgtaacgttggtgtgccatacatcgttgttttcttaaacaaagttgatatggttgacgacgaagaattattagaattagttgaaatggaagttcgtgacttattaactgaatatgacttcccaggagacgatgttcctgtaatcgctggttctgcattaaaagctttagaaggcgaccctgcttacgaagaaaaaatcttagaattaatggctgcagttgacgaatacatcccaactccagaacgtgacaacgacaaaccattcatgatgccagttgaagacgtgttctcaattactggtcgtggtactgttgctacaggtcgtgttgaacgtggacaagttcgtgttggtgacgaagttgaaatcgttggtatcgctgacgaaacttctaaaacaacagttactggtgttgaaatgttccgtaaattattagattacgctgaagctggagacaacatcggtgcattattacgtggtgtggctcgtgaagacatccaacgtggtcaagtattagctaaaccaggttcaatcactccacatacaaaattcactgctgaagtgtacgttttaactaaagaagaaggtggacgtcatactccat

SEQ ID NO: 970 - DNA, 634 bp, Enterococcus flavescens
  ref <308>: DATABASE ACCESSION NUMBER: ATCC 49997
tatgcctcaaacacgtgaacacatcttgttatcacgtaacgttggtgtaccatacatcgttgttttcttaaacaaaatggatatggttgatgacgaagaattactagaattagttgaaatggaagttcgtgacttattgtcagaatatgacttcccaggcgacgatgttcctgtaatcgctggttctgctttgaaagctcttgaaggcgatgcttcatacgaagaaaaaatcatggaattaatggctgcagttgacgaatacgttccaactccagaacgtgacactgacaaaccattcatgatgccagtcgaagacgtattctcaatcactggacgtggtactgttgctacaggccgtgttgaacgtggacaagttcgcgttggtgacgaagttgaaatcgttggtattgctgaagaaactgctaaaacaactgtaactggtgttgaaatgttccgtaaattgttagactatgctgaagcaggggataacattggtgcattgctacgtggggttgctcgtgaagacatccaacgtggacaagtattagctaaagctggtacaatcacacctcatacaaaatttaaagctgaagtttacgttttaacaaaagaagaaggtggacgtcacactcca

SEQ ID NO: 971 - DNA, 787 bp, Streptococcus pneumoniae
  strain StrR-55
ggaccaatgccacaaactcgtgagcacatccttctttcacgtcaggttggtgttaaacaccttatcgtcttcatgaacaaagttgacttggttgacgacgaagaattgcttgaattggttgaaatggaaatccgtgacctattgtcagaatacgacttcccaggtgacgatcttccagttatccaaggttcagcacttaaagctcttgaaggtgactctaaatacgaagacatcgttatggaattgatgaacacagttgatgagtatatcccagaaccagaacgtgacactgacaaaccattgcttcttccagtcgaggacgtattctcaatcactggacgtggtacagttgcttcaggacgtatcgaccgtggtatcgttaaagtcaacgacgaaatcgaaatcgttggtatcaaagaagaaactcaaaaagcagttgttactggtgttgaaatgttccgtaaacaacttgacgaaggtcttgctggagataacgtaggtgtccttcttcgtggtgttcaacgtgatgaaatcgaacgtggacaagttatcgctaaaccaggttcaatcaacccacacactaaattcaaaggtgaagtctacatccttactaaagaagaaggtggacgtcacactccattcttcaacaactaccgtccacaattctacttccgtactactgacgttacaggttcaatcgaacttccagcaggtactgaaatggtaatgcctggtgataacgtgacaatcgacgttgagttgattcacccaatcgccgtagaacaag

SEQ ID NO: 972 - DNA, 803 bp, Escherichia coli
  ref <308>: DATABASE ACCESSION NUMBER: ATCC 35401
tagttgctgcgactgacggcccgatgccgcagactcgtgagcacatcctgctgggtcgtcaggtaggcgttccgtacatcatcgtgttcctgaacaaatgcgacatggttgatgacgaagagctgctggaactggttgaaatggaagttcgtgaacttctgtctcagtacgacttcccgggcgacgacactccgatcgttcgtggttctgctctgaaagcgctggaaggcgacgcagagtgggaagcgaaaatcctggaactggctggcttcctggattcttacattccggaaccagagcgtgcgattgacaagccgttcctgctgccgatcgaagacgtattctccatctccggtcgtggtaccgttgttaccggtcgtgtagaacgcggtatcatcaaagttggtgaagaagttgaaatcgttggtatcaaagagactcagaagtctacctgtactggcgttgaaatgttccgcaaactgctggacgaaggccgtgctggtgagaacgtaggtgttctgctgcgtggtatcaaacgtgaagaaatcgaacgtggtcaggtactggctaagccgggcaccatcaagccgcacaccaagttcgaatctgaagtgtacattctgtccaaagatgaaggcggccgtcatactccgttcttcaaaggctaccgtccgcagttctacttccgtactactgacgtgactggtaccatcgaactgccggaaggcgtagagatggtaatgccgggcgacaacatcaaaatggttgttaccctgatccacccgatcgcgatggacgacggt

SEQ ID NO: 973 - DNA, 762 bp, Escherichia coli
  ref <308>: DATABASE ACCESSION NUMBER: ATCC 43895
actgacggcccgatgccgcagactcgtgagcacatcctgctgggtcgtcaggtaggcgttccgtacatcatcgtgttcctgaacaaatgcgacatggttgatgacgaagagctgctggaactggttgaaatggaagttcgtgaacttctgtctcagtacgacttcccgggcgacgacactccgatcgttcgtggttctgctctgaaagcgctggaaggcgacgcagagtgggaagcgaaaatcctggaactggctggcttcctggattcctacattccggaaccagagcgtgcrattgacaagccgttcctgctgccgatcgaagacgtattctccatctccggtcgtggtaccgttgttaccggtcgtgtagaacgcggtatcatcaaagttggtgaagaagttgaaatcgttggtatcaaagagactcagaagtctacctgtactggcgttgaaatgttccgcaaactgctggacgaaggccgtgctggtgagaacgtaggtgttctgctgcgtggtatcaaacgtgaagaaatcgaacgtggtcaggtactggctaagccgggcaccatcaagccgcacaccaagttcgaatctgaagtgtacattctgtccaaagatgaaggcggccgtcatactccgttcttcaaaggctaccgtccgcagttctacttccgtactactgacgtgactggtaccattgaactgccggaaggcgtagagatggtaatgccgggcgacaacatcaaaatggttgttacc

SEQ ID NO: 974 - DNA, 804 bp, Escherichia coli
  ref <308>: DATABASE ACCESSION NUMBER: ATCC 11775
cctggtagttgctgcgactgacggcccgatgccgcagactcgtgagcacatcctgctgggtcgtcaggtaggcgttccgtacatcatcgtgttcctgaacaaatgcgacatggttgatgacgaagagctgctggaactggttgaaatggaagttcgtgaacttctgtctcagtacgacttcccgggcgacgacactccgatcgttcgtggttctgctctgaaagcgctggaaggcgacgcagagtgggaagcgaaaatcctggaactggctggcttcctggattcctacattccggaaccagagcgtgcgattgacaagccgttcctgctgccgatcgaagacgtattctccatctccggtcgtggtaccgttgttaccggtcgtgtagaacgcggtatcatcaaagttggtgaagaagttgaaatcgttggtatcaaagagactcagaagtctacctgtactggcgttgaaatgttccgcaaactgctggacgaaggccgtgctggtgagaacgtaggtgttctgctgcgcggtatcaaacgtgaagaaatcgaacgtggtcaggtactggctaagccgggcaccatcaagccgcacaccaagttcgaatctgaagtgtacattctgtccaaagatgaaggcggtcgtcatactccgttcttcaaaggctaccgtccgcagttctacttccgtactactgacgtgactggtaccatcgaactgccggaaggcgtagagatggtaatgccgggcgacaacatcaaaatggttgttaccctgatccacccgatcgcgatggacga

SEQ ID NO: 975 - DNA, 804 bp, Escherichia coli
  ref <308>: DATABASE ACCESSION NUMBER: ATCC 25922
gcgatcctggtagttgctgcgactgacggcccgatgccgcagactcgtgagcacatcctgctgggtcgtcaggtaggcgttccgtacatcatcgtgttcctgaacaaatgcgacatggttgatgacgaagagctgctggaactggttgaaatggaagttcgtgaacttctgtctcagtacgacttcccgggcgacgacactccgatcgttcgtggttctgctctgaaagcgctggaaggcgacgcagagtgggaagcgaaaatcctggaactggctggcttcctggattcytacattccggaaccagagcgtgcgattgacaagccgttcctgctgccgatcgaagacgtattctccatctccggtcgtggtaccgttgttaccggtcgtgtagaacgcggtatcatcaaagttggtgaagaagttgaaatcgttggtatcaaagagactcagaagtctacctgtactggcgttgaaatgttccgcaaactgctggacgaaggccgtgctggtgagaacgtaggtgttctgctgcgtggtatcaaacgtgaagaaatcgaacgtggtcaggtactggctaagccgggcaccatcaagccgcacaccaagttcgaatctgaagtgtacattctgtccaaagatgaaggcggtcgtcatactccgttcttcaaaggctaccgtccgcagttctacttccgtactactgacgtgactggtaccatcgaactgccggaaggtgtagagatggtaatgccgggcgacaacatcaaaatggttgttaccctgatccacccgatcgcgatg

SEQ ID NO: 976 - DNA, 825 bp, Mycobacterium avium
  strain Mavi-1
ggcgcgatcctggtggtcgccgccaccgacggcccgatgccgcagacccgtgagcacgtgctgctcgcccgtcaggtcggtgtgccctacatcctggtcgccctgaacaaggccgacatggtcgacgacgaggagctcctcgagctcgtcgagatggaggtccgcgagctgctggccgcccaggagttcgacgaggacgccccggtggtgcgggtctcggcgctcaaggcgctcgagggcgacgccaagtgggtcgagtccgtcgagcagctgatggaggccgtcgacgagtcgatcccggacccggtccgcgagacggagaagccgttcctgatgccggtggaggacgtcttcaccatcaccgggcgtggcaccgtggtcaccggtcgtgtcgagcgcggtgtgatcaacgtgaacgaggaagtcgagatcgtcggcatccgcccgaccagcaccaagaccacggtcaccggtgtggaratgttccgcaagctgctcgaccagggccaggccggtgacaacgtcggtctgctgctgcgtggtatcaagcgtgaggacgtcgagcgcggccaggtcgtgaccaagcccggcaccaccacgccgcacaccgagttcgagggccaggtctacatcctgtccaaggacgagggcggccggcacacgccgttcttcaacaactaccgtccgcagttctacttccgcaccaccgacgtgaccggtgtggtgacgctgccggagggcaccgagatggtgatgcccggtgacaacaccaacatctcggtgaagctgatccagcccgtcgccatggacgacggtstgcggttc

SEQ ID NO: 977 - DNA, 820 bp, Streptococcus pneumoniae
  strain StrR-06
tatccttgtagtagcttcaactgacggaccaatgccacaaactcgtgagcacatccttctttcacgtcaggttggtgttaaacaccttatcgtcttcatgaacaaagttgacttggttgacgacgaagaattgcttgaattggttgaaatggaaatccgtgacctattgtcagaatacgacttcccaggtgacgatcttccagttatccaaggttcagcacttaaagctcttgaaggtgactctaaatacgaagacatcgttatggaattgatgaacacagttgatgagtatatcccagaaccagaacgtgacactgacaaaccattgcttcttccagtcgaggacgtattctcaatcactggacgtggtacagttgcttcaggacgtatcgaccgtggtatcgttaaagtcaacgacgaaatcgaaattgttggtatcaaagaagaaactcaaaaagcagttgttactggtgttgaaatgttccgtaaacaacttgacgaaggtcttgctggagataacgtaggtgtccttcttcgtggtgttcaacgtgatgaaatcgaacgtggacaagttatcgctaaaccaggttcaatcaacccacacactaaattcaaaggtgaagtctacatccttactaaagaagaaggtggacgtcacactccattcttcaacaactaccgtccacaattctacttccgtactactgacgttacaggttcaatcgaacttccagcaggtactgaaatggtaatgcctggtgataacgtgacaatcgacgttgagttgattcacccaatcgccgtagaacaaggtactaca

SEQ ID NO: 978 - DNA, 822 bp, Mycobacterium gordonae
  strain M-Gor-1
ggcgcgatcctggtggtcgccgccaccgatggcccgatgccgcagacccgtgagcacgtgctgctcgcccgtcaggtgggcgtgccctacatcctggtggcgctgaacaagtccgacgcggtcgacgacgaggagctgctcgagctcgtcgagctggaggtccgcgagttgctggccgcccaggacttcgacgaggaagctccggtggtccgggtctcggcgctgaaggcgctcgagggcgacgccacctgggtgaagtcggtagaggacttgatggacgcggtcgacgagtcgattccggacccggtccgcgacaccgacaagccgttcctgatgcccgtcgaggacgtcttcaccatcaccggtcgtggcaccgtcgtcaccggccgtgtggagcgcggcgtggtgaacgtgaacgaggaagtcgagatcgtcggcatcaagccgaccagcaccaagaccacggtcaccggtgtggagatgttccgcaagctgctcgaccagggtcaggccggtgacaacgtcggtctgctgctgcgtggtgtcaagcgtgaggacgtcgagcgcggccaggtcgtcatcaagcccggcaccaccactccgcacaccgagttcgagggtcaggtctacatcctgtccaaggacgagggcggccggcacacgccgttcttcaacaactaccgtccgcagttctacttccgcaccaccgacgtgaccggtgtggtgacgctgccggagggcaccgaaatggtgatgcccggtgacaacaccaacatctcggtgaagctgatccagcccgtcgccatggacgacggtctgcgg

SEQ ID NO: 979 - DNA, 821 bp, Streptococcus pneumoniae
  strain StrR-11
ctatccttgtagtagcttcaactgacggaccaatgccacaaactcgtgagcacatccttctttcacgtcaggttggtgttaaacaccttatcgtcttcatgaacaaagttgacttggttgacgacgaagaattgcttgaattggttgaaatggaaatccgtgacctattgtcagaatacgacttcccaggtgacgatcttccagttatccaaggttcagcacttaaagctcttgaaggtgactctaaatacgaagacatcgttatggaattgatgaacacagttgatgagtatatcccagaaccagaacgtgacactgacaaaccattgcttcttccagtcgaggacgtattctcaatcactggacgtggtacagttgcttcaggacgtatcgaccgtggtatcgttaaagtcaacgacgaaatcgaaatcgttggtatcaaagaagaaactcaaaaagcagttgttactggtgttgaaatgttccgtaaacaacttgacgaaggtcttgctggagataacgtaggtgtccttcttcgtggtgttcaacgtgatgaaatcgaacgtggacaagttatcgctaaaccaggttcaatcaacccacacactaaattcaaaggtgaagtctacatccttactaaagaagaaggtggacgtcacactccattcttcaacaactaccgtccacaattctacttccgtactactgacgttacaggttcaatcgaacttccagcaggtactgaaatggtaatgcctggtgataacgtgacaatcgacgttgagttgattcacccaatcgccgtagaacaaggtactaca

SEQ ID NO: 980 - DNA, 828 bp, Mycobacterium tuberculosis
  misc_feature (1)...(828): n=a,t,c or g
  ref <308>: DATABASE ACCESSION NUMBER: ATCC 25177
ggtgcgatcctggtggtcgccgccaccgacggcccgatgccccagacccgcgagcacgttctgctggcgcgtcaagtgggtgtgccctacatcctggtagcgctgaacaaggccgacgcagtggacgacgaggagctgctcgaactcgtcgagatggaggtccgcgagctgctggctgcccaggaattcgacgaggacgccccggttgtgcgggtctcggcgctcaaggcgctcgagggtgacgcgaagtgggttgcctctgtcgaggaactgatgaacgcggtcgacgagtcgattccggacccggtccgcgagaccgacaagccgttcctgatgccggtcgaggacgtcttcaccattaccggccgcggaaccgtggtcaccggacgtgtggagcgcggcgtgatcaacgtgaacgaggaagttgagatcgtcggcattcgcccatcgaccaccaagaccaccgtcaccggtgtggagatgttccgcaagctgctcgaccagggccaggcgggcgacaacgttggtttgctgctgcggggcgtcaagcgcgaggacgtcgagcgtggccaggttgtcaccaagcccggcaccaccacgccgcacaccgagttcgaaggccaggtctacatcctgtccaaggacgagggcggccggcacacgccgttcttcaacaactaccgtccgcagttctacttccgcaccaccgacgtgaccggtgtggtgacactgccggagggcaccgagatggtgatgcccggtgacaacaccaacatctcggtgaagttgatccagcccgtcgccatggacgaaggtntgcgtttcgcg

SEQ ID NO: 981 - DNA, 819 bp, Staphylococcus warneri
  strain CSG 144
cggcggtatcttagtagtatctgctgcagatggcccaatgccacaaactcgtgaacacatcttattatcacgtaacgttggtgtaccagctttagttgtattcttaaacaaagctgacatggttgacgacgaagaattattagaattagttgaaatggaagttcgtgacttattatctgaatacgacttccctggtgacgatgtaccagttatcgttggttctgcattaaaagctttagaaggcgacccagaatacgaacaaaaaatcttagacttaatgcaagctgtagatgactacatcccaactccagaacgtgactctgataaaccattcatgatgccagttgaggacgtattctcaatcactggtcgtggtactgtagcaacaggccgtgttgaacgtggtcaaatcaaagtcggtgaagaagttgaaatcatcggtatcactgaagaaagcaagaaaacaacagttacaggtgtagaaatgttccgtaaattattagactacgctgaagctggtgacaacatcggtgctttattacgtggtgttgcacgtgaagacgtacaacgtggacaagtattagcagctcctggctctattactccacacacaaaattcaaagctgatgtttacgttttatctaaagaagaaggtggacgtcatactccattcttcactaactaccgcccacaattctacttccgtactactgacgtaactggcgttgttcacttaccagaaggtactgaaatggttatgcctggcgataacgtagaaatgactgttgaattaatcgctccaatcgcgattgaagacgg

SEQ ID NO: 982 - DNA, 814 bp, Streptococcus mitis
  strain LSPQ 2583
ctatccttgtagtagcttcaactgacggaccaatgccacaaactcgtgagcacatccttctttcacgtcaggttggtgttaaacaccttatcgtcttcatgaacaagatcgacttggttgatgacgaagaattgcttgaattggttgaaatggaaatccgtgacctcttgtcagaatacgacttcccaggtgacgatcttccagttatccaaggttcagctcttaaagctcttgaaggtgatactaagtacgaagacatcatcatggaattgatgaacactgttgatgagtacatcccagaaccagaacgtgatactgacaaacctcttcttcttccagtcgaagacgtattctcaatcactggtcgtggtacagttgcttcaggacgtatcgaccgtggtactgttcgtgtcaacgatgaaatcgaaatcgttggtatcaaagaagaaatccaaaaagcagttgttactggtgttgaaatgttccgtaaacagcttgacgaaggtcttgcaggggacaacgtaggtgtacttcttcgtggtatccaacgtgatgaaatcgaacgtggtcaagttatcgctaaaccaggttcaatcaacccacacactaaattcaagggtgaagtttacatccttactaaagaagaaggtggacgtcacactccattcttcaacaactaccgtccacagttctacttccgtacaactgacgttacaggttcaatcgaacttccagcaggtactgaaatggtaatgcctggtgataacgtaactatcgacgttgagttgatccacccaatcgccgttgaacaagg

SEQ ID NO: 983 - DNA, 810 bp, Streptococcus mitis
  ref <308>: DATABASE ACCESSION NUMBER: ATCC 49456
ctatccttgtagtagcttcaactgacggaccaatgccacaaactcgtgagcacatccttctttcacgtcaggttggtgttaaacaccttatcgtcttcatgaacaaagttgacttggttgacgacgaagaattgcttgaattggttgaaatggaaatccgtgacctattgtcagaatacgacttcccaggtgacgatcttccagttatccaaggttcagctcttaaagcccttgaaggtgacactaaatacgaagacatcgttatggaattgatgaacacagttgatgagtacatcccagaaccagaacgtgacactgacaaaccattgcttcttccagtcgaagacgtattctcaatcactggtcgtggtacagttgcttcaggacgtatcgaccgtggtatcgttaaagtcaacgacgaaatcgaaatcgttggtatcaaagaagaaactcaaaaagcagttgttactggtgttgaaatgttccgtaaacaacttgacgaaggtcttgccggagataatgtaggtgtccttcttcgtggtgttcaacgtgatgaaatcgaacgtggacaagttattgctaaaccaggttcaatcaacccacacactaaattcaaaggtgaagtttacatccttactaaagaagaaggtggacgtcacactccattcttcaacaactaccgtccacaattctacttccgtactactgacgttacaggttcaatcgaacttccagcaggtactgaaatggtaatgcctggtgataacgtgacaatcgacgttgagttgatccacccaatcgccgtagaac

SEQ ID NO: 984 - DNA, 817 bp, Streptococcus mitis
  ref <308>: DATABASE ACCESSION NUMBER: ATCC 903
tccttgtagtagcttcaactgacggaccaatgccacaaactcgtgagcacatccttctttcacgtcaggttggtgttaaacaccttatcgtcttcatgaacaagatcgacttggttgatgacgaagaattgcttgaattggttgaaatggaaatccgtgacctcttgtcagaatacgacttcccaggtgacgatcttccagttatccaaggttcagctcttaaagctcttgaaggtgatactaagtacgaagacatcatcatggaattgatgaacactgttgatgagtacatcccagaaccagaacgtgatactgacaaacctcttcttcttccagtcgaagacgtattctcaatcactggtcgtggtacagttgcttcaggacgtatcgaccgtggtactgttcgtgtcaacgatgaaatcgaaatcgttggtatcaaagaagaaatccaaaaagcagttgttactggtgttgaaatgttccgtaaacagcttgacgaaggtcttgcaggggacaacgtaggtgtacttcttcgtggtatccaacgtgatgaaatcgaacgtggtcaagttatcgctaaaccaggttcaatcaacccacacactaaattcaagggtgaagtttacatccttactaaagaagaaggtggacgtcacactccattcttcaacaactaccgtccacagttctacttccgtacaactgacgttacaggttcaatcgaacttccagcaggtactgaaatggtaatgcctggtgataacgtaactatcgacgttgagttgatccacccaatcgccgttgaacaaggtactac

SEQ ID NO: 985 - DNA, 798 bp, Streptococcus oralis
  ref <308>: DATABASE ACCESSION NUMBER: ATCC 35037
gacggaccaatgccacaaactcgtgagcacatccttctttcacgtcaggttggtgttaaacaccttattgtcttcatgaacaaaattgacttggtagacgacgaagaattgcttgaattggttgaaatggaaatccgtgacctcttgtcagaatacgacttcccaggtgacgatcttccagttatccaaggttcagctcttaaagctcttgaaggtgactctaaatacgaagacatcattatggaattgatgaacactgttgatgagtacatcccagaaccagaacgtgacactgaaaaaccattgcttcttccagtcgaagacgtattctcaatcactggacgtggtacagttgcttcaggacgtatcgaccgtggtactgttcgtgtcaacgacgaaatcgaaatcgttggtatcaaagaagaaactcaaaaagcagttgttactggtgttgaaatgttccgtaaacaacttgacgaaggtcttgccggagataacgtaggtgtccttcttcgtggtgttcaacgtgacgaaatcgaacgtggacaagttatcgctaaaccaggttcaatcaacccacacactaaatttaaaggtgaagtctacatccttactaaagaagaaggtggacgtcacactccattcttcaacaactaccgtccacaattctacttccgtactactgacgttacaggttcaatcgaacttcctgcaggtactgaaatggtaatgcctggtgataacgtgactatcgacgttgagttgatccacccaatcgccgtagaacaaggtactaca

SEQ ID NO: 986 - DNA, 815 bp, Streptococcus pneumoniae
  strain StrR-05
ttgtagtagcttcaactgacggaccaatgccacaaactcgtgagcacatccttctttcacgtcaggttggtgttaaacaccttatcgtcttcatgaacaaagttgacttggttgacgacgaagaattgcttgaattggttgaaatggaaatccgtgacctattgtcagaatacgacttcccaggtgacgatcttccagttatccaaggttcagcacttaaagctcttgaaggtgactctaaatacgaagacatcgttatggaattgatgaacacagttgatgagtatattccagaaccagaacgtgacactgacaaaccattgcttcttccagtcgaggacgtattctcaatcactggacgtggtacagttgcttcaggacgtatcgaccgtggtatcgttaaagtcaacgacgaaatcgaaatcgttggtatcaaagaagaaactcaaaaagcagttgttactggtgttgaaatgttccgtaaacaacttgacgaaggtcttgctggagataacgtaggtgtccttcttcgtggtgttcaacgtgatgaaatcgaacgtggacaagttatcgctaaaccaggttcaatcaacccacacactaaattcaaaggtgaagtctacatccttactaaagaagaaggtggacgtcacactccattcttcaacaactaccgtccacaattctacttccgtactactgacgttacaggttcaatcgaacttccagcaggtactgaaatggtaatgcctggtgataacgtgacaatcgacgttgagttgattcacccaatcgccgtagaacaaggtactaca

SEQ ID NO: 987 - DNA, 832 bp, Enterococcus hirae
  ref <308>: DATABASE ACCESSION NUMBER: ATCC 8043
cggacaatcttggttgtttctgctacggatggcccaatgcctcaaactcgtgaacacattttactttctcgccaagtaggcgtgaaatatttgattgttttcttgaacaaaacagatttagtcgatgatgaagaattaattgatctagtagaaatggaagttcgtgaactattaagcgaatatggatttccaggtgatgatacacctgttatcaaaggatcagcattaaaagcattacaaggtgatcctgatgcagaagcagctatcatggaattgatggacacagtcgatgaatacatcccaacaccagaacgtgatacggacaaaccattattgttacccgccgaagatgtattttcaattactggacgtggaacagtagcatctggtcggattgaccgtggggctgttagagtcggtgacgaaatcgaaatcgtagggatcaaaccagaaacgcaaagagccgtagtaacaggagttgaaatgttccgcaaaacgcttgattacggtgaagcaggggataacgtaggtgtgttattacgtgggattcaaagagaagacatcgaacgtggccaagtgattgccaaacctggttcaattacacctcatactaaattcaaagcagaagtttaggttttgactaaagaagaaggcggacgtcatacaccattcttcaataattatcgaccacaattttatttccgcacaactgacgtaacaggaacaattgttttgccagaaggaacggaaatggtcatgcctggcgacaacgtaacgatcgatgtagaattgattcatcctgttgctattgaaaacgggacgactttctcca

SEQ ID NO: 988 - DNA, 835 bp, Enterococcus mundtii
  ref <308>: DATABASE ACCESSION NUMBER: ATCC 43186
tggtgcgatcttagttgtttctgcgacagatggaccaatgcctcaaactcgcgagcatatccttttatcacgtcaagttggtgtaaaatatttgattgtatttttgaataaagttgatttggtcgatgatgaagaattgatcgatcttgtagaaatggaagttcgtgaattactgaatgaatatggtttcccaggtgatgacacacctgtcatcaaaggctctgcattgaaagcattgcaaggtgacccagaagcagaagctgcgatcaatgaattgatggaaacagtggatgactatatcccaacaccagaacgtgataccgacaaaccattgcttttaccagttgaagatgttttctcaatcactggtcgcggaacggtagcatctggtcgtatcgaccgtggagccgttcgtgtcggtgatgaaatcgagatcatcggaatcaaacctgaaacgaaaaaagcggttgtgacaggggtagagatgttccgtaaaacgttagattatggcgaagctggagataacgtaggaatcttgttacgtggtatccaaagagaagatattgaacgtggacaagtaattgcgaaacctggttcaatcacaccacatacaaaattcaaagcggaagtttatgtattgacgaaagaagaaggcggacgtcatacaccattcttcaataactaccgcccacaattttatttccgcacaacagatgtaacaggtacgatcgtgttgccagaaggaacagaaatggtcatgcctggagacaacgtaaccatcgaggtagagttgatccatccagtggcaatcgaacaaggaacgactttctctatt

SEQ ID NO: 989 - DNA, 832 bp, Enterococcus raffinosus
  ref <308>: DATABASE ACCESSION NUMBER: ATCC 49427
tgcgatcttagtagtatctactactgatggaccaatgcctcaaacacgtgagcacattttgttatcacgccaagtaggtgttaaatacttgatcgtcttcttgaacaaagttgatttagtcgacgatgaagaattgattgatttagttgaaatggaagtacgtgagttactttcagaatatggtttcccaggcgatgatattcctgttcttaaaggttcagctctgaaagctttagaaggcgatcctgaacaagaacaagtaatcatggacctaatggatacggttgacgaatatatcccaacaccagaacgtgacactgacaaaccattcttgttaccagtggaagatgttttctcaatcacaggacgtgggactgttgcatctggtcgtattgatcgtggggaagttaaagtcggtgacgaagttgaaattatcgggatcaaacctgaagttcaaaaggctgtcgtaactggacttgaaatgttccgtaaaacattggattatggtgaagctggagataacgttggggttctattacgtggtattacacgtgatgaaatcgaacgtggtcaagtattagctaaaccaggttcaattacaccacatacgaaattcagtgcagaagtttatgtgttgacgaaagaagaaggtggacgtcatacaccattctttaacaactatcgtcctcaattctacttccgtacaacagacgttaccggtaatatcgtgttgccagaaggtactgaaatggtcatgcctggcgataacgtaacaatcgacgttgaattaatccatccaatcgccgtagaaaaaggaacaactttctctatt

SEQ ID NO: 990 - DNA, 154 bp, Bacillus anthracis
  strain CIP 9440
ggatcctgtatatgcacaaaaactaggtgttaacatcgatgaattactattatcacaacctgatacaggggagcaaggtttagaaatcgcagaagcacttgtacgaagtggtgcggttgatattatcgtaattgactctgtagcagctcttgta

SEQ ID NO: 991 - DNA, 384 bp, Prevotella melaninogenica
  ref <308>: DATABASE ACCESSION NUMBER: ATCC 25845
gccattgcagaggcacagaagcagggcggtattgcagccttcattgatgctgagcacgccttcgaccgtttctatgcagagaagttaggtgtggatgttgataacctttgggtttcacagccagacaatggtgagcaggctttagagattgccgaccagctgattcgctcttccgctattgacattctcgttgtcgactcagttgcagccttgactccaaagaaggagattgagggtgacatgggtgactctgcagtaggtttacaagcacgactgatgagtcaggcattgcgtaaacttacctcaacaatcgcaaaaactaatacttgctgcatcttcatcaaccagttgcgtgagaagattggtgtgatgtttggtaatcca

SEQ ID NO: 992 - DNA, 624 bp, Enterococcus casseliflavus
  strain R760
acacgtgaacacatcttgttatcacgtaacgttggtgtaccatacatcgttgttttcttaaacaaaatggatatggttgatgacgaagaattactagaattagttgaaatggaagttcgtgacttattgtcagaatatgacttcccaggcgacgatgttcctgtaatcgctggttctgctttgaaagctcttgaaggcgatgcttcatacgaagaaaaaatcatggaattaatggctgcagttgacgaatacgttccaactccagaacgtgacactgacaaaccattcatgatgccagtcgaagacgtattctcaatcactggacgtggtactgttgctacaggccgtgttgaacgtggacaagttcgcgttggtgacgaagttgaaatcgttggtattgctgaagaaactgctaaaacaactgtaactggtgttgaaatgttccgtaaattgttagactatgctgaagcaggggataacattggtgcattgctacgtggtgttgctcgtgaagacatccaacgtggacaagtattggctaaagctggtacaatcacacctcatacaaaatttaaagctgaagtttacgttttaacaaaagaagaaggtggacgtcatacacca

SEQ ID NO: 993 - DNA, 756 bp, Streptococcus pyogenes
atggaaaacaataaaaaagtattgaagaaaatggtattttttgttttagtgacatttcttggactaacaatctcgcaagaggtatttgctcaacaagaccccgatccaagccaacttcacagatctagtttagttaaaaaccttcaaaatatatattttctttatgagggtgaccctgttactcacgagaatgtgaaatctgttgatcaacttttatctcacgatttaatatataatgtttcagggccaaattatgataaattaaaaactgaacttaagaaccaagagatggcaactttatttaaggataaaaacgttgatatttatggtgtagaatattaccatctctgttatttatgtgaaaatgcagaaaggagtgcatgtatctacggaggggtaacaaatcatgaagggaatcatttagaaattcctaaaaagatagtcgttaaagtatcaatcgatggtatccaaagcctatcatttgatattgaaacaaataaaaaaatggtaactgctcaagaattagactataaagttagaaaatatcttacagataataagcaactatatactaatggaccttctaaatatgaaactggatatataaagttcatacctaagaataaagaaagtttttggtttgattttttccctgaaccagaatttactcaatctaaatatcttatgatatataaagataatgaaacgcttgactcaaacacaagccaaattgaagtctacctaacaaccaagtaa

SEQ ID NO: 994 - DNA, 23 bp, Artificial Sequence
  Synthetic DNA Sequence
tggactaacaatctcgcaagagg

SEQ ID NO: 995 - DNA, 22 bp, Artificial Sequence
  Synthetic DNA Sequence
acattctcgtgagtaacagggt

SEQ ID NO: 996 - DNA, 25 bp, Artificial Sequence
  Synthetic DNA Sequence
acaaatcatgaagggaatcatttag

SEQ ID NO: 997 - DNA, 23 bp, Artificial Sequence
  Synthetic DNA Sequence
ctaattcttgagcagttaccatt

SEQ ID NO: 998 - DNA, 23 bp, Artificial Sequence
  Synthetic DNA Sequence
ggaggggtaacaaatcatgaagg

SEQ ID NO: 999 - DNA, 23 bp, Artificial Sequence
  Synthetic DNA Sequence
ttgaccttgttgatgacgaagag

SEQ ID NO: 1000 - DNA, 23 bp, Artificial Sequence
  Synthetic DNA Sequence
ttagtgtgtgggttgattgaact

SEQ ID NO: 1001 - DNA, 23 bp, Artificial Sequence
  Synthetic DNA Sequence
aagagttgcttgaattagttgag

SEQ ID NO: 1002 - DNA, 894 bp, Streptococcus pyogenes
  ref <308>: DATABASE ACCESSION NUMBER: ATCC 700294
aacatgatcactggtgccgctcaaatggacggagctatccttgtagttgcttcaactgatggaccaatgccacaaactcgtgagcacatccttctttcacgtcaggttggtgttaaacaccttatcgtgttcatgaacaaagttgaccttgttgatgacgaagagttgcttgaattagttgagatggaaattcgtgaccttctttcagaatacgatttcccaggtgatgaccttccagttatccaaggttcagctcttaaagctcttgaaggcgacactaaatttgaagacatcatcatggaattgatggatactgttgattcatacattccagaaccagaacgcgacactgacaaaccattgcttcttccagtcgaagacgtattctcaattacaggtcgtggtacagttgcttcaggacgtatcgaccgtggtactgttcgtgtcaacgacgaaatcgaaatcgttggtatcaaagaagaaactaaaaaagctgttgttactggtgttgaaatgttccgtaaacaacttgacgaaggtcttgcaggagacaacgtaggtatccttcttcgtggtgttcaacgtgacgaaatcgaacgtggtcaagttattgctaaaccaagttcaatcaacccacacactaaattcaaaggtgaagtatatatcctttctaaagacgaaggtggacgtcacactccattcttcaacaactaccgtccacaattctacttccgtacaactgacgtaacaggttcaatcgaacttccagcaggtacagaaatggttatgcctggtgataacgtgacaatcaacgttgagttgatccacccaatcgccgtagaacaaggtactactttctcaatccgtgaaggtggacgtactgttggttcaggt

SEQ ID NO: 1003 - DNA, 332 bp, Bacillus cereus
  ref <308>: DATABASE ACCESSION NUMBER: ATCC 14579
aatggatcctgtatatgcacaaaaattaggcgttaacatagatgaattactattatcacagcctgatacaggggagcaaggattagaaatcgcggaagcacttgtacgaagtggtgcggttgacattatcgtaattgactctgtagcagctcttgtaccgaaagcagagattgaaggcgacatgggtgactcacacgtaggtttacaagcacgtttaatgtcacaagcacttcgtaagctttcaggagcaatcaacaaatcaaaaacaattgcaatctttattaaccaaattcgtgaaaaagttggggttatgttcggaaacccagaaacaa

SEQ ID NO: 1004 - DNA, 1212 bp, Streptococcus pneumoniae
  strain StrR-01
accaagaagctcaaaaacatctgtgggatatctacaactccgatcaatacgtctcttaccctgacgatgatttgcaagtcgcatctacggtcgtagatgtttcaaatggtaaagtcatcgcccaacttggagctcgtcaccaagcaagtaacgtttcatttggtaccaaccaagctgtggaaaccaatcgtgactggggttctgctatgaaaccaatcaccgattatgcacctgccatagaatacggtgtttatgattccactgcaactatggttaatgatattccttataactatccgggaacaagcacacctgtctacaactgggatagagcatatttcggtaatattactctgcaatatgctcttcaacaatcacgaaatgtcacagccgttgagactttgaataaggtcggtctagatagagctaaaaccttccttaatggtcttggtatcgactatccaagcatgcattatgcaaacgccatttcaagtaatacaacagaatctaataaacaatacggagcaagtagtgaaaaaatggctgctgcttatgctgcctttgcaaatggtggcacttactataaaccaatgtatatccataaagtcgtcttcagtgatggaagtaaaaaagagttctctaatgtcggaactcgtgccatgaaggaaacgacagcctatatgatgaccgacatgatgaaaacagtcttgacttatggaactgggcgtggagcctatcttccttggcttcctcaagctggtaaaacaggaacctctaactatacagatgaggaagttgaaaaccacatcaagaacactggctatgtagctccagatgaaatgtttgttggttatactcgtaagtattctatggctgtatggacaggttattcgaatcgtttaactcctatcgttggagatggtttcctagttgcagctaaagtttatcgctcaatgataacgtatctatcagaagatactcatccagaagactggacgatgccagacggacttttcagaaacggggaatttgtattcaaaaatggagctcgcccaatatggactgaaccctctactcaacaatcctcaacagctgaaagttcaagctcatcatcagatagttcaacttcacagtctagctcaaccactccaagcacaaataatagtacgactaccaatcctaacaataatacgcaacaatcaaatacaaccc

SEQ ID NO: 1005 - DNA, 1212 bp, Streptococcus pneumoniae
  strain StrR-02
aagctcaaaaacatctgtgggatatctacaactccgatcaatacgtctcttaccctgacgatgatttgcaagtcgcatctacggtcgtagatgtttcaaatggtaaagtcatcgcccaacttggagctcgtcaccaagcaagtaacgtttcatttggtaccaaccaagctgtggaaaccaatcgtgactggggttctgctatgaaaccaatcaccgattatgcacctgccatagaatacggtgtttatgattccactgcaactatggttaatgatattccttataactatccgggaacaagcacacctgtctacaactgggatagagcatatttcggtaatattactctgcaatatgctcttcaacaatcacgaaatgtcacagccgttgagactttgaataaggtcggtctagatagagctaaaaccttccttaatggtcttggtatcgactatccaagcatgcattatgcaaacgccatttcaagtaatacaacagaatctaataaacaatacggagcaagtagtgaaaaaatggctgctgcttatgctgcctttgccaacggtggaatttaccacaaacccatgtatatcaataaggtcgtcttcagtgacggtagtaaaaaagaattttcagatgtaggtacacgagctatgaaagaaacaactgcttacatgatgaccgaaatgatgaaaactgtcttggcatacggaactggtcgtggagcctatctcccatggttagcgcaagctggtaagacaggtacttctaactacacagatgatgaaattgaaaaacacatcaagaacactggctatgtagctccagatgaaatgtttgttggttatactcgtaagtattctatggctgtatggacaggttattcgaatcgtttaactcctatcgttggagatggtttcctagttgcagctaaagtttatcgctcaatgataacgtatctgtctgaaggaagcaatccagaggattggaatataccagaggggctctacagaaatggagaattcgtatttaaaaatggtgctcgttctacgtggagctcacctgctccacaacaacccccatcaactgaaagttcaagctcatcatcagatagttcaacttcacagtctaactcaaccactccaagcacaaataatagtacgactaccaatcctaacaataatacgcaacaatcaaatacaacccctgatc

SEQ ID NO: 1006 - DNA, 1213 bp, Streptococcus pneumoniae
  strain StrR-03
accaagaagctcaaaaacatctgtgggatatctacaactccgatcaatacgtctcttaccctgacgatgatttgcaagtcgcatctacggtcgtagatgtttcaaatggtaaagtcatcgcccaacttggagctcgtcaccaagcaagtaacgtttcatttggtaccaaccaagctgtggaaaccaatcgtgactggggttctgctatgaaaccaatcaccgattatgcacctgccatagaatacggtgtttatgattccactgcaactatggttaatgatattccttataactatccgggaacaagcacacctgtctacaactgggatagagcatatttcggtaatattactctgcaatatgctcttcaacaatcacgaaatgtcacagccgttgagactttgaataaggtcggtctagatagagctaaaaccttccttaatggtcttggtatcgactatccaagcatgcattatgcaaacgccatttcaagtaatacaacagaatctaataaacaatacggagcaagtagtgaaaaaatggctgctgcttatgctgcctttgccaacggtggaatttaccacaaacccatgtatatcaataaggtcgtcttcagtgacggtagtaaaaaagaattttcagatgtaggtacacgagctatgaaagaaacaactgcttacatgatgaccgaaatgatgaaaactgtcttggcatacggaactggtcgtggagcctatctcccatggttagcgcaagctggtaagacaggtacttctaactacacagatgatgaaattgaaaaacacatcaagaacactggctatgtagctccagatgaaatgtttgttggttatactcgtaagtattctatggctgtatggacaggttattcgaatcgtttaactcctatcgttggagatggtttcctagttgcagctaaagtttatcgctcaatgataacgtatctgtctgaaggaagcaatccagaggattggaatataccagaggggctctacagaaatggagaattcgtatttaaaaatggtgctcgttctacgtggagctcacctgctccacaacaacccccatcaactgaaagttcaagctcatcatcagatagttcaacttcacagtctaactcaaccactccaagcacaaataatagtacgactaccaatcctaacaataatacgcaacaatcaaatacaacccc

SEQ ID NO: 1007 - DNA, 1218 bp, Streptococcus pneumoniae
  strain StrR-04
accaagaagctcaaaaacatctgtgggatatctacaactccgatcaatacgtctcttaccctgacgatgatttgcaagtcgcatctacggtcgtagatgtttcaaatggtaaagtcatcgcccaacttggagctcgtcaccaagcaagtaacgtttcatttggtaccaaccaagctgtggaaaccaatcgtgactggggttctgctatgaaaccaatcaccgattatgcacctgccatagaatacggtgtttatgattccactgcaactatggttaatgatattccttataactatccgggaacaagcacacctgtctacaactgggatagagcatatttcggtaatattactctgcaatatgctcttcaacaatcacgaaatgtcacagccgttgagactttgaataaggtcggtctagatagagctaaaaccttccttaatggtcttggtatcgactatccaagcatgcattatgcaaacgccatttcaagtaatacaacagaatctaataaacaatacggagcaagtagtgaaaaaatggctgctgcttatgctgcctttgcaaatggtggcacttactataaaccaatgtatatccataaagtcgtcttcagtgatggaagtaaaaaagagttctctaatgtcggaactcgtgccatgaaggaaacgacagcctatatgatgaccgacatgatgaaaacagtcttgacttatggaactgggcgtggagcctatcttccttggcttcctcaagctggtaaaacaggaacctctaactatacagatgaggaagttgaaaaccacatcaagaacactggctatgtagctccagatgaaatgtttgttggttatactcgtaagtattctatggctgtatggacaggttattcgaatcgtttaactcctatcgttggagatggtttcctagttgcagctaaagtttatcgctcaatgataacgtatctatcagaagatactcatccagaagactggacgatgccagacggacttttcagaaacggggaatttgtattcaaaaatggagctcgcccaatatggactgaaccctctactcaacaatcctcaacagctgaaagttcaagctcatcatcagatagttcaacttcacagtctagctcaaccactccaagcacaaataatagtacgactaccaatcctaacaataatacgcaacaatcaaatacaacccctgatc

SEQ ID NO: 1008 - DNA, 1223 bp, Streptococcus pneumoniae
  strain StrR-05
gtagaccaagaagctcaaaaacatctgtgggatatctacaactccgatcaatacgtctcttaccctgacgatgatttgcaagtcgcatctacggtcgtagatgtttcaaatggtaaagtcatcgcccaacttggagctcgtcaccaagcaagtaacgtttcatttggtaccaaccaagctgtggaaaccaatcgtgactggggttctgctatgaaaccaatcaccgattatgcacctgccatagaatacggtgtttatgattccactgcaactatggttaatgatattccttataactatccgggaacaagcacacctgtctacaactgggatagagcatatttcggtaatattactctgcaatatgctcttcaacaatcacgaaatgtcacagccgttgagactttgaataaggtcggtctagatagagctaaaaccttccttaatggtcttggtatcgactatccaagcatgcattatgcaaacgccatttcaagtaatacaacagaatctaataaacaatacggagcaagtagtgaaaaaatggctgctgcttatgctgcctttgcaaatggtggcacttactataaaccaatgtatatccataaagtcgtcttcagtgatggaagtaaaaaagagttctctaatgtcggaactcgtgccatgaaggaaacgacagcctatatgatgaccgacatgatgaaaacagtcttgacttatggaactgggcgtggagcctatcttccttggcttcctcaagctggtaaaacaggaacctctaactatacagatgaggaagttgaaaaccacatcaagaacactggctatgtagctccagatgaaatgtttgttggttatactcgtaagtattctatggctgtatggacaggttattcgaatcgtttaactcctatcgttggagatggtttcctagttgcagctaaagtttatcgctcaatgataacgtatctatcagaagatactcatccagaagactggacgatgccagacggacttttcagaaacggggaatttgtattcaaaaatggagctcgcccaatatggactgaaccctctactcaacaatcctcaacagctgaaagttcaagctcatcatcagatagttcaacttcacagtctagctcaaccactccaagcacaaataatagtacgactaccaatcctaacaataatacgcaacaatcaaatacaacccctgatca

SEQ ID NO: 1009 - DNA, 1214 bp, Streptococcus pneumoniae
  strain StrR-06
accaagaagctcaaaaacatctgtgggatatctacaactccgatcaatacgtctcttaccctgacgatgatttgcaagtcgcatctacggtcgtagatgtttcaaatggtaaagtcatcgcccaacttggagctcgtcaccaagcaagtaacgtttcatttggtaccaaccaagctgtggaaaccaatcgtgactggggttctgctatgaaaccaatcaccgattatgcacctgccatagaatacggtgtttatgattccactgcaactatggttaatgatattccttataactatccgggaacaagcacacctgtctacaactgggatagagcatatttcggtaatattactctgcaatatgctcttcaacaatcacgaaatgtcacagccgttgagactttgaataaggtcggtctagatagagctaaaaccttccttaatggtcttggtatcgactatccaagcatgcattatgcaaacgccatttcaagtaatacaacagaatctaataaacaatacggagcaagtagtgaaaaaatggctgctgcttatgctgcctttgcaaatggtggcacttactataaaccaatgtatatccataaagtcgtcttcagtgatggaagtaaaaaagagttctctaatgtcggaactcgtgccatgaaggaaacgacagcctatatgatgaccgacatgatgaaaacagtcttgacttatggaactgggcgtggagcctatcttccttggcttcctcaagctggtaaaacaggaacctctaactatacagatgaggaagttgaaaaccacatcaagaacactggctatgtagctccagatgaaatgtttgttggttatactcgtaagtattctatggctgtatggacaggttattcgaatcgtttaactcctatcgttggagatggtttcctagttgcagctaaagtttatcgctcaatgataacgtatctatcagaagatactcatccagaagactggacgatgccagacggacttttcagaaacggggaatttgtattcaaaaatggagctcgcccaatatggactgaaccctctactcaacaatcctcaacagctgaaagttcaagctcatcatcagatagttcaacttcacagtctagctcaaccactccaagcacaaataatagtacgactaccaatcctaacaataatacgcaacaatcaaatacaacccct

SEQ ID NO: 1010 - DNA, 1223 bp, Streptococcus pneumoniae
  strain StrR-07
ccaagaagctcaaaaacatctgtgggatatctacaactccgatcaatacgtctcttaccctgacgatgatttgcaagtcgcatctacggtcgtagatgtttcaaatggtaaagtcatcgcacaacttggtgctcgtcatcaagcaagtaatgtttcattcggtaccaaccaggccgtagaaaccaatcgtgactggggatcatcaatgaaaccaatcactgactatgctcccgctttagaatatggagtctatgactctactgcttctattgtacatgatgtcccttataactatcctggcactgatactccactctacaactgggatcatgtctactttggaaacattacaatccagtatgctcttcaacaatcacgaaatgtcacagccgttgagactttgaataaggtcggtctagatagagctaaaaccttccttaatggtcttggtatcgactatccaagcatgcattatgcaaacgccatttcaagtaacacaactgaatccaacaaaaaatatggtgcaagtagtgaaaaaatggctgctgcctacgctgcttttgctaatggtggtatttatcacaaaccaatgtatatcaataaaatcgtctttagtgatggtagcgaaaaagaattttctgatgctggtacacgagctatgaaagagactactgcctatatgatgactgaaatgatgaaaactgttttaacttacggaacaggacgtggagcctacctaccatggcttccacaagcaggtaagacaggtacttctaactatactgacgaagaaattgaaaagtatatcaagaacactggttacgtagctccagatgaaatgtttgtagggtatacccgtaaatatgcaatggctgtttggacaggatactcaaatcgtctaactccaatcatcggagatggtttccttgttgctggtaaagtctatcgttcaatgataacttacctttctgaagatgaccaacctggagattggacaatgccagatggcttgtatagaaatggagaattcgtatttaaaaatggtgctcgttctacgtggagctcacctgctccacaacaacccccatcaactgaaagttcaagctcatcatcagatagttcaacttcacagtctaactcaaccactccaagcacaaataatagtacgactaccaatcctaacaataatacgcaacaatcaaatacaacccctgatcaacaaa

SEQ ID NO: 1011 - DNA, 1207 bp, Streptococcus pneumoniae
  strain StrR-08
aagctcaaaaacatctgtgggatatctacaactccgatcaatacgtctcttaccctgacgatgatttgcaagtcgcatctacggtcgtagatgtttcaaatggtaaagtcatcgcccaacttggagctcgtcaccaagcaagtaacgtttcatttggtaccaaccaagctgtggaaaccaatcgtgactggggttctgctatgaaaccaatcaccgattatgcacctgccatagaatacggtgtttatgattccactgcaactatggttaatgatattccttataactatccgggaacaagcacacctgtctacaactgggatagagcatatttcggtaatattactctgcaatatgctcttcaacaatcacgaaatgtcacagccgttgagactttgaataaggtcggtctagatagagctaaaaccttccttaatggtcttggtatcgactatccaagcatgcattatgcaaacgccatttcaagtaatacaacagaatctaataaacaatacggagcaagtagtgaaaaaatggctgctgcttatgctgcctttgcaaatggtggcacttactataaaccaatgtatatccataaagtcgtcttcagtgatggaagtaaaaaagagttctctaatgtcggaactcgtgccatgaaggaaacgacagcctatatgatgaccgacatgatgaaaacagtcttgacttatggaactgggcgtggagcctatcttccttggcttcctcaagctggtaaaacaggaacctctaactatacagatgaggaagttgaaaaccacatcaagaacactggctatgtagctccagatgaaatgtttgttggttatactcgtaagtattctatggctgtatggacaggttattcgaatcgtttaactcctatcgttggagatggtttcctagttgcagctaaagtttatcgctcaatgataacgtatctatcagaagatactcatccagaagactggacgatgccagacggacttttcagaaacggggaatttgtattcaaaaatggagctcgcccaatatggactgaaccctctactcaacaatcctcaacagctgaaagttcaagctcatcatcagatagttcaacttcacagtctagctcaaccactccaagcacaaataatagtacgactaccaatcctaacaataatacgcaacaatcaaatacaacccc

SEQ ID NO: 1012 - DNA, 1201 bp, Streptococcus pneumoniae
  strain StrR-09
aagctcaaaaacatctgtgggatatctacaactccgatcaatacgtctcttaccctgacgatgatttgcaagtcgcatctacggtcgtagatgtttcaaatggtaaagtcatcgcccaacttggagctcgtcaccaagcaagtaacgtttcatttggtaccaaccaagctgtggaaaccaatcgtgactggggttctgctatgaaaccaatcaccgattatgcacctgccatagaatacggtgtttatgattccactgcaactatggttaatgatattccttataactatccgggaacaagcacacctgtctacaactgggatagagcatatttcggtaatattactctgcaatatgctcttcaacaatcacgaaatgtcacagccgttgagactttgaataaggtcggtctagatagagctaaaaccttccttaatggtcttggtatcgactatccaagcatgcattatgcaaacgccatttcaagtaatacaacagaatctaataaacaatacggagcaagtagtgaaaaaatggctgctgcttatgctgcctttgccaacggtggaatttaccacaaacccatgtatatcaataaggtcgtcttcagtgacggtagtaaaaaagaattttcagatgtaggtacacgagctatgaaagaaacaactgcttacatgatgaccgaaatgatgaaaactgtcttggcatacggaactggtcgtggagcctatctcccatggttagcgcaagctggtaagacaggtacttctaactacacagatgatgaaattgaaaaacacatcaagaacactggctatgtagctccagatgaaatgtttgttggttatactcgtaagtattctatggctgtatggacaggttattcgaatcgtttaactcctatcgttggagatggtttcctagttgcagctaaagtttatcgctcaatgataacgtatctatcagaagatactcatccagaagactggacgatgccagacggacttttcagaaacggggaatttgtattcaaaaatggagctcgttctacgtggaactcacctgctccacaacaacccccatcaactgaaagttcaagctcatcatcagatagttcaacttcacagtctagctcaaccactccaagcacaaataatagtacgactaccgatcctaacaataatacgcaacaatcaaatac

SEQ ID NO: 1013 - DNA, 1220 bp, Streptococcus pneumoniae
  strain StrR-10
tgtagaccaagaagctcaaaaacatctgtgggatatctacaactccgatcaatacgtctcttaccctgacgatgatttgcaagtcgcatctacggtcgtagatgtttcaaatggtaaagtcatcgcacaacttggtgctcgtcatcaagcaagtaatgtttcattcggtaccaaccaggccgtagaaaccaatcgtgactggggatcatcaatgaaaccaatcactgactatgctcccgctttagaatatggagtctatgactctactgcttctattgtacatgatgtcccttataactatcctggcactgatactccactctacaactgggatcatgtctactttggaaacattacaatccagtatgctcttcaacaatcacgaaatgtcacagccgttgagactttgaataaggtcggtctagatagagctaaaaccttccttaatggtcttggtatcgactatccaagcatgcattatgcaaacgccatttcaagtaacacaactgaatccaacaaaaaatatggtgcaagtagtgaaaaaatggctgctgcctacgctgcttttgctaatggtggtatttatcacaaaccaatgtatatcaataaaatcgtctttagtgatggtagcgaaaaagaattttctgatgctggtacacgagctatgaaagagactactgcctatatgatgactgaaatgatgaaaactgttttaacttacggaacaggacgtggagcctacctaccatggcttccacaagcaggtaagacaggtacttctaactatactgacgaagaaattgaaaagtatatcaagaacactggctacgtagctccagatgaaatgtttgtgggttatactcgtaagtattctatggctgtatggacaggttattcgaatcgtttaactcctatcgttggagatggtttcctagttgcagctaaagtttatcgctctatgatgacctacctgtctgaaggaagcaatccagaggattggaatataccagaggggctctacagaaatggagaattcgtatttaaaaatggtgctcgttctacgtggagctcacctgctccacaacaacccccatcaactgaaagttcaagctcatcatcagatagttcaacttcacagtctagctcaaccactccaagcacaaataatagtacgactaccaatcctaacaataatacgcaacaatcaaatacaacccctg

SEQ ID NO: 1014 - DNA, 1199 bp, Streptococcus pneumoniae
  strain StrR-11
caaaaacatctgtgggatatttacaatacagacgaatacgttgcctatccagacgatgaattgcaagtcgcttctaccattgttgatgtttctaacggtaaagtcattgcccagctaggagcacgccatcagtcaagtaatgtttccttcggaattaaccaagcagtagaaacaaaccgcgactggggatcaactatgaaaccgatcacagactatgctcctgccttggagtacggtgtctacgattcaactgctactatcgttcacgatgagccctataactaccctgggacaaatacccctgtttataactgggataggggctactttggcaacatcaccttgcaatacgccctgcaacaatcgcgaaacgtcccagccgtggaaactctaaacaaggtcggactcaaccgcgccaagactttcctaaatggtctcggaatcgactacccaagtattcactactcaaatgccatttcaagtaacacaaccgaatcagacaaaaaatatggagcaagtagtgaaaagatggctgctgcttacgctgcctttgcaaatggtggaacttactataaaccaatgtatatccataaagtcgtctttagtgatgggagtgaaaaagagttctctaatgtcggaactcgtgccatgaaggaaacgacagcctatatgatgaccgacatgatgaaaactgtcttagtatacggaatcggacgtggagcctacctaccttggcttccacaagcaggtaaaacaggtacttctaactatactgacgaagaaattgaaaagtatatcaagaacactggttacgtagctccagatgaaatgtttgtagggtatacccgcaaatatgcaatggctgtatggacaggctattctaaccgtctgacaccacttgtaggcgatggccttacggtcgctgctaaagtttaccgctctatgatgacctacctgtctgaaggaagcaatccagaggattggaatataccagaggggctctacagaaatggagaattcgtatttaaaaatggtgctcgttctacgtggaactcacctgctccacaacaacccccatcaactgaaagttcaagctcatcatcagatagttcaacttcacagtctagctcaaccactccaagcacaaataatagtacgactaccaatcctaacaataatacgcaacaatcaaatacaac

SEQ ID NO: 1015 - DNA, 1211 bp, Streptococcus pneumoniae
  strain StrR-12
aagctcaaaaacatctgtgggatatctacaactccgatcaatacgtctcttaccctgacgatgatttgcaagtcgcatctacggtcgtagatgtttcaaatggtaaagtcatcgcccaacttggagctcgtcaccaagcaagtaacgtttcatttggtaccaaccaagctgtggaaaccaatcgtgactggggttctgctatgaaaccaatcaccgattatgcacctgccatagaatacggtgtttatgattccactgcaactatggttaatgatattccttataactatccgggaacaagcacacctgtctacaactgggatagagcatatttcggtaatattactctgcaatatgctcttcaacaatcacgaaatgtcacagccgttgagactttgaataaggtcggtctagatagagctaaaaccttccttaatggtcttggtatcgactatccaagcatgcattatgcaaacgccatttcaagtaatacaacagaatctaataaacaatacggagcaagtagtgaaaaaatggctgctgcttatgctgcctttgccaacggtggaatttaccacaaacccatgtatatcaataaggtcgtcttcagtgacggtagtaaaaaagaattttcagatgtaggtacacgagctatgaaagaaacaactgcttacatgatgaccgaaatgatgaaaactgtcttggcatacggaactggtcgtggagcctatctcccatggttagcgcaagctggtaagacaggtacttctaactacacagatgatgaaattgaaaaacacatcaagaacactggctatgtagctccagatgaaatgtttgttggttatactcgtaagtattctatggctgtatggacaggttattcgaatcgtttaactcctatcgttggagatggtttcctagttgcagctaaagtttatcgctcaatgataacgtatctgtctgaaggaagcaatccagaggattggaatataccagaggggctctacagaaatggagaattcgtatttaaaaatggtgctcgttctacgtggagctcacctgctccacaacaacccccatcaactgaaagttcaagctcatcatcagatagttcaacttcacagtctaactcaaccactccaagcacaaataatagtacgactaccaatcctaacaataatacgcaacaatcaaatacaacccctgat

SEQ ID NO: 1016 - DNA, 1222 bp, Streptococcus pneumoniae
  strain StrR-13
gtagaccaagaagctcaaaaacatctgtgggatatctacaactccgatcaatacgtctcttaccctgacgatgatttgcaagtcgcatctacggtcgtagatgtttcaaatggtaaagtcatcgcacaacttggtgctcgtcatcaagcaagtaatgtttcattcggtaccaaccaggccgtagaaaccaatcgtgactggggatcatcaatgaaaccaatcactgactatgctcccgctttagaatatggagtctatgactctactgcttctattgtacatgatgtcccttataactatcctggcactgatactccactctacaactgggatcatgtctactttggaaacattacaatccagtatgctcttcaacaatcacgaaatgtcacagccgttgagactttgaataaggtcggtctagatagagctaaaaccttccttaatggtcttggtatcgactatccaagcatgcattatgcaaacgccatttcaagtaacacaactgaatccaacaaaaaatatggtgcaagtagtgaaaaaatggctgctgcctacgctgcttttgctaatggtggtatttatcacaaaccaatgtatatcaataaaatcgtctttagtgatggtagcgaaaaagaattttctgatgctggtacacgagctatgaaagagactactgcctatatgatgactgaaatgatgaaaactgttttaacttacggaacaggacgtggagcctacctaccatggcttccacaagcaggtaagacaggtacttctaactatactgacgaagaaattgaaaagtatatcaagaacactggctacgtagctccagatgaaatgtttgtgggttatactcgtaagtattctatggctgtatggacaggttattcgaatcgtttaactcctatcgttggagatggtttcctagttgcagctaaagtttatcgctctatgatgacctacctgtctgaaggaagcaatccagaggattggaatataccagaggggctctacagaaatggagaattcgtatttaaaaatggtgctcgttctacgtggagctcacctgctccacaacaacccccatcaactgaaagttcaagctcatcatcagatagttcaacttcacagtctagctcaaccactccaagcacaaataatagtacgactaccaatcctaacaataatacgcaacaatcaaatacaacccctgatc

SEQ ID NO: 1017 - DNA, 1229 bp, Streptococcus pneumoniae
  strain StrR-14
tgtagaccaagaagctcaaaaacatctgtgggatatttacaatacagacgaatacgttgcctatccagacgatgaattgcaagtcgcttctaccattgttgatgtttctaacggtaaagtcattgcccagctaggagcacgccatcagtcaagtaatgtttccttcggaattaaccaagcagtagaaacaaaccgcgactggggatcaactatgaaaccgatcacagactatgctcctgccttggagtacggtgtctacgattcaactgctactatcgttcacgatgagccctataactaccctgggacaaatacccctgtttataactgggataggggctactttggcaacatcaccttgcaatacgccctgcaacaatcgcgaaacgtcccagccgtggaaactctaaacaaggtcggactcaaccgcgccaagactttcctaaatggtctcggaatcgactacccaagtattcactactcaaatgccatttcaagtaacacaaccgaatcagacaaaaaatatggagcaagtagtgaaaagatggctgctgcttacgctgcctttgcaaatggtggaacttactataaaccaatgtatatccataaagtcgtctttagtgatgggagtgaaaaagagttctctaatgtcggaactcgtgccatgaaagaaacaactgcttacatgatgaccgaaatgatgaaaactgtcctggcatacggaagtggtcgtggagcctatctcccatggttagcgcaagctggtaagacaggtacttctaactacacagatgatgaaattgaaaaacacatcaagaacactggctatgtagctccagatgaaatgtttgttggttatactcgtaagtattctatggctgtatggacaggttattcgaatcgtttaactcctatcgttggagatggtttcctagttgcagctaaagtttatcgctcaatgataacgtatctatcaaaagatactcatccagaagactggacgatgccagacggacttttcagaaacggggaatttgtattcaaaaatggagctcgttctacgtggaactcacctgctccacaacaacccccatcaactgaaagttcaagctcatcatcagatagttcaacttcacagtctaactcaaccactccaagcacaaataatagtacgactaccaatcctaacaataatacgcaacaatcaaatacaacccctgatcaacaaa

SEQ ID NO: 1018 - DNA, 1225 bp, Streptococcus pneumoniae
  strain StrR-15
atgtagaccaagaggctcaaaaacgtctgtgggatatctacaactccgatcaatacgtctcttaccctgacgatgatttgcaagtcgcatctacggtcgtagatgtttcaaatggtaaagtcatcgcccaacttggagctcgtcaccaagcaagtaacgtttcatttggtaccaaccaagctgtggaaaccaaccgtgactggggatcaagcatgaaaccaatcactgattatgccccagccttagaatatggtgtatatgattccactgcaactatggttaatgatattccttataactatccgggcacaagcacacctgtctacaactgggatcgagcatattttggtaatattagcctgcaatatgcccttcaacaatctcgtaacgtgcctgccgttgaaacactaaacaaggttggtttagatagagccaaaactttcctaaatggtttgggaattgactatccaagtattcactactcaaatgctatttcaagtaatacaactgaatctagtaaacagtacggggcaagcagtgagaaaatggctgcggcttacgctgcattcgctaatggcggtatttaccacaaaccaatgtacatcaataaagttgtctttagtgatggtagcgaaaaagaattttctgatgctggtacacgagctatgaaagagactactgcctatatgatgactgaaatgatgaaaactgttttaacttacggaacaggacgtggagcctacctaccatggcttccacaagcaggtaagacaggtacttctaactatactgacgacgaaattgaaaagtatatcaagaacactggctacgtagctccagatgaaatgtttgtgggttatactcgtaagtattctatggctgtatggactggatactcaaatcgtttaactccaatcattggagatggtttcctagttgctgccaaagtttatcgctcaatgatatcgtatctatcagaagatgaccatcctggagattggacaatgcctgagggagtatacagaagtggagaattcgtatttaaaaatggtgctcgttctacgtggagctcccctgctccacaacaacccccatcaactgaaagttcaagctcatcatcagatagttcaacttcacagtctagcttaaccactccaagcacaaataatagtacgactaccaatcctaacaacaatacgcaacaatcaaatacaacccctgatca

SEQ ID NO: 1019 - DNA, 1439 bp, Streptococcus pneumoniae
  strain StrR-01
gcctctatttcaaaggagatgcctggcattagtatttctacttcttgggatcgaaaggttttggaaacttccctttcttctatagtagggagtgtatccagtgaaaaagctggtctcccagcggaagaagcagaatcctatcttaaaaaaggctattctctaaatgaccgtgttggaacctcctatttggaaaagcaatatgaagagaccttacaaggaaaacgctcggtaaaagaaatccatctggataaatatggcaatatggaaagcgtggacacaattgaggaaggtagtaagggaaacaatatcaaactgaccattgatttggccttccaagatagcgtggatgctttgctgaaaagttatttcaattccgagctaggaaatggtggagctaaatattctgaaggtgtctatgcagtcgcccttaacccaaaaacaggtgctgttttatccatgtcagggatcaaacatgacctgaaaacgggagagttgactcctgattccttgggaacggtaaccaatgtctttgtcccaggttcggttgtcaaggctgcgaccatcagctcaggttgggaaaatggtgttttatcaggaaaccaaaccttaacagatcagcctattgttttccaaggttcagctccaatttattcttggtataaattggcatatggatcttttcctattacagctgtggaagccttggagtattcatccaatgcttacatggttcaaaccgctcttggaatcatgggccagacctatcaaccaaatatgtttgttggaaccagcaatttggaaacagctatgggaaaacttcgtgcgacctttggcgaatatggcttgggggctgcgaccggaattgacctaccagatgaatctactggatttgttcccaaagagtatagctttgctaattacatcaccaattcctttgggcagtttgataactatacgcccatgcagttggctcagtatgtagcaactattgcaaataatggtgttcgtgtggctcctcgtattgttgaaggcatttatggtaataatgataagggaggactgggtgacttgattcagcaactgcaaccgacagagatgaataaggtcaatatatccgactccgatatgagcatcttgcaccaaggtttttatcaggttgcccatggtactagtggattgacaactggacgtgccttttcaaatggtgccttggtatccattagcggaaaaacaggtacagccgaaagctatgtggcagatggtcagcaagcaaccaataccaatgcggtggcctatgccccatctgataatccccaaatcgctgtcgcagtggtctttcctcataataccaatctaacaaatggtgtaggaccttccattgcgcgtgacattatcaatctgtatcaaaaataccatccaatgaactagaaaggaaatta

SEQ ID NO: 1020 - DNA, 1441 bp, Streptococcus pneumoniae
  strain StrR-02
gcctctatttcaaaggagatgcctggcattagtatttctacttcttgggatcgaaaggttttggaaacttccctttcttctatagtagggagtgtatccagtgaaaaagctggtctcccagcggaagaagcagaatcctatcttaaaaaaggctattctctaaatgaccgtgttggaacctcctatttggaaaagcaatatgaagagaccttacaaggaaaacgctcggtaaaagaaatccatctggataaatatggcaatatggaaagcgtggacacaattgaggaaggtagtaagggaaacaatatcaaactgaccattgatttggccttccaagatagcgtggatgctttgctgaaaagttatttcaattccgagctaggaaatggtggagctaaatattctgaaggtgtctatgcagtcgcccttaacccaaaaacaggtgctgttttatccatgtcagggatcaaacatgacctgaaaacgggagagttgactcctgattccttgggaacggtaaccaatgtctttgtcccaggttcggttgtcaaggctgcgaccatcagctcaggttgggaaaatggtgttttatcaggaaaccaaaccttaacagatcagcctattgttttccaaggttcagctccaatttattcttggtataaattggcatatggatcttttcctattacagctgtggaagccttggagtattcatccaatgcttacatggttcaaaccgctcttggaatcatgggccagacctatcaaccaaatatgtttgttggaaccagcaatttggaaacagctatgggaaaacttcgtgcgacctttggcgaatatggcttgggggctgcgaccggaattgacctaccagatgaatctactggatttgttcccaaagagtatagctttgctaattacatcaccaattcctttgggcagtttgataactatacgcccatgcagttggctcagtatgtagcaactattgcaaataatggtgttcgtgtggctcctcgtattgttgaaggcatttatggtaataatgataagggaggactgggtgacttgattcagcaactgcaaccgacagagatgaataaggtcaatatatccgactccgatatgagcatcttgcaccaaggtttttatcaggttgcccatggtactagtggattgacaactggacgtgccttttcaaatggtgccttggtatccattagcggaaaaacaggtacagccgaaagctatgtggcagatggtcagcaagcaaccaataccaatgcggtggcctatgccccatctgataatccccaaatcgctgtcgcagtggtctttcctcataataccaatctaacaaatggtgtaggaccttccattgcgcgtgacattatcaatctgtatcaaaaataccatccaatgaactagaaaggaaattatg

SEQ ID NO: 1021 - DNA, 1396 bp, Streptococcus pneumoniae
  strain StrR-03
tattgcctctatttcaaaggagatgcctggcattagtatttctacttcttgggatcgaaaggttttggaaacttccctttcttctatagtagggagtgtatccagtgaaaaagctggtctcccagcggaagaagcagaatcctatcttaaaaaaggctattctctaaatgaccgtgttggaacctcctatttggaaaagcaatatgaagagaccttacaaggaaaacgctcggtaaaagaaatccatctggataaatatggcaatatggaaagcgtggacacaattgaggaaggtagtaagggaaacaatatcaaactgaccattgatttggccttccaagatagcgtggatgctttgctgaaaagttatttcaattccgagctaggaaatggtggagctaaatattctgaaggtgtctatgcagtcgcccttaacccaaaaacaggtgctgttttatccatgtcagggatcaaacatgacctgaaaacgggagagttgactcctgattccttgggaacggtaaccaatgtctttgtcccaggttcggttgtcaaggctgcgaccatcagctcaggttgggaaaatggtgttttatcaggaaaccaaaccttaacagatcagcctattgttttccaaggttcagctccaatttattcttggtataaattggcatatggatcttttcctattacagctgtggaagccttggagtattcatccaatgcttacatggttcaaaccgctcttggaatcatgggccagacctatcaaccaaatatgtttgttggaaccagcaatttggaaacagctatgggaaaacttcgtgcgacctttggcgaatatggcttgggggctgcgaccggaattgacctaccagatgaatctactggatttgttcccaaagagtatagctttgctaattacatcaccaattcctttgggcagtttgataactatacgcccatgcagttggctcagtatgtagcaactattgcaaataatggtgttcgtgtggctcctcgtattgttgaaggcatttatggtaataatgataagggaggactgggtgacttgattcagcaactgcaaccgacagagatgaataaggtcaatatatccgactccgatatgagcatcttgcaccaaggtttttatcaggttgcccatggtactagtggattgacaactggacgtgccttttcaaatggtgccttggtatccattagcggaaaaacaggtacagccgaaagctatgtggcagatggtcagcaagcaaccaataccaatgcggtggcctatgccccatctgataatccccaaatcgctgtcgcagtggtctttcctcataataccaatctaacaaatggtgtaggaccttccattgcgcgtgacatt

SEQ ID NO: 1022 - DNA, 1428 bp, Streptococcus pneumoniae
  strain StrR-04
aaaggagatgcctggcattagtatttctacttcttgggatcgaaaggttttggaaacttccctttcttctatagtagggagtgtatccagtgaaaaagctggtctcccagcggaagaagcagaatcctatcttaaaaaaggctattctctaaatgaccgtgttggaacctcctatttggaaaagcaatatgaagagaccttacaaggaaaacgctcggtaaaagaaatccatctggataaatatggcaatatggaaagcgtggacacaattgaggaaggtagtaagggaaacaatatcaaactgaccattgatttggccttccaagatagcgtggatgctttgctgaaaagttatttcaattccgagctaggaaatggtggagctaaatattctgaaggtgtctatgcagtcgcccttaacccaaaaacaggtgctgttttatccatgtcagggatcaaacatgacctgaaaacgggagagttgactcctgattccttgggaacggtaaccaatgtctttgtcccaggttcggttgtcaaggctgcgaccatcagctcaggttgggaaaatggtgttttatcaggaaaccaaaccttaacagatcagcctattgttttccaaggttcagctccaatttattcttggtataaattggcatatggatcttttcctattacagctgtggaagccttggagtattcatccaatgcttacatggttcaaaccgctcttggaatcatgggccagacctatcaaccaaatatgtttgttggaaccagcaatttggaaacagctatgggaaaacttcgtgcgacctttggcgaatatggcttgggggctgcgaccggaattgacctaccagatgaatctactggatttgttcccaaagagtatagctttgctaattacatcaccaattcctttgggcagtttgataactatacgcccatgcagttggctcagtatgtagcaactattgcaaataatggtgttcgtgtggctcctcgtattgttgaaggcatttatggtaataatgataagggaggactgggtgacttgattcagcaactgcaaccgacagagatgaataaggtcaatatatccgactccgatatgagcatcttgcaccaaggtttttatcaggttgcccatggtactagtggattgacaactggacgtgccttttcaaatggtgccttggtatccattagcggaaaaacaggtacagccgaaagctatgtggcagatggtcagcaagcaaccaataccaatgcggtggcctatgccccatctgataatccccaaatcgctgtcgcagtggtctttcctcataataccaatctaacaaatggtgtaggaccttccattgcgcgtgacattatcaatctgtatcaaaaataccatccaatgaactagaaaggaaatta

SEQ ID NO: 1023 - DNA, 1442 bp, Streptococcus pneumoniae
  strain StrR-05
tgcctctatttcaaaggagatgcctggcattagtatttctacttcttgggatcgaaaggttttggaaacttccctttcttctatagtagggagtgtatccagtgaaaaagctggtctcccagcggaagaagcagaatcctatcttaaaaaaggctattctctaaatgaccgtgttggaacctcctatttggaaaagcaatatgaagagaccttacaaggaaaacgctcggtaaaagaaatccatctggataaatatggcaatatggaaagcgtggacacaattgaggaaggtagtaagggaaacaatatcaaactgaccattgatttggccttccaagatagcgtggatgctttgctgaaaagttatttcaattccgagctaggaaatggtggagctaaatattctgaaggtgtctatgcagtcgcccttaacccaaaaacaggtgctgttttatccatgtcagggatcaaacatgacctgaaaacgggagagttgactcctgattccttgggaacggtaaccaatgtctttgtcccaggttcggttgtcaaggctgcgaccatcagctcaggttgggaaaatggtgttttatcaggaaaccaaaccttaacagatcagcctattgttttccaaggttcagctccaatttattcttggtataaattggcatatggatcttttcctattacagctgtggaagccttggagtattcatccaatgcttacatggttcaaaccgctcttggaatcatgggccagacctatcaaccaaatatgtttgttggaaccagcaatttggaaacagctatgggaaaacttcgtgcgacctttggcgaatatggcttgggggctgcgaccggaattgacctaccagatgaatctactggatttgttcccaaagagtatagctttgctaattacatcaccaattcctttgggcagtttgataactatacgcccatgcagttggctcagtatgtagcaactattgcaaataatggtgttcgtgtggctcctcgtattgttgaaggcatttatggtaataatgataagggaggactgggtgacttgattcagcaactgcaaccgacagagatgaataaggtcaatatatccgactccgatatgagcatcttgcaccaaggtttttatcaggttgcccatggtactagtggattgacaactggacgtgccttttcaaatggtgccttggtatccattagcggaaaaacaggtacagccgaaagctatgtggcagatggtcagcaagcaaccaataccaatgcggtggcctatgccccatctgataatccccaaatcgctgtcgcagtggtctttcctcataataccaatctaacaaatggtgtaggaccttccattgcgcgtgacattatcaatctgtatcaaaaataccatccaatgaactagaaaggaaattatg

SEQ ID NO: 1024 - DNA, 1445 bp, Streptococcus pneumoniae
  strain StrR-06
ttgcctctatttcaaaggagatgcctggcattagtatttctacttcttgggatcgaaaggttttggaaacttccctttcttctatagtagggagtgtatccagtgaaaaagctggtctcccagcggaagaagcagaatcctatcttaaaaaaggctattctctaaatgaccgtgttggaacctcctatttggaaaagcaatatgaagagaccttacaaggaaaacgctcggtaaaagaaatccatctggataaatatggcaatatggaaagcgtggacacaattgaggaaggtagtaagggaaacaatatcaaactgaccattgatttggccttccaagatagcgtggatgctttgctgaaaagttatttcaattccgagctaggaaatggtggagctaaatattctgaaggtgtctatgcagtcgcccttaacccaaaaacaggtgctgttttatccatgtcagggatcaaacatgacctgaaaacgggagagttgactcctgattccttgggaacggtaaccaatgtctttgtcccaggttcggttgtcaaggctgcgaccatcagctcaggttgggaaaatggtgttttatcaggaaaccaaaccttaacagatcagcctattgttttccaaggttcagctccaatttattcttggtataaattggcatatggatcttttcctattacagctgtggaagccttggagtattcatccaatgcttacatggttcaaaccgctcttggaatcatgggccagacctatcaaccaaatatgtttgttggaaccagcaatttggaaacagctatgggaaaacttcgtgcgacctttggcgaatatggcttgggggctgcgaccggaattgacctaccagatgaatctactggatttgttcccaaagagtatagctttgctaattacatcaccaattcctttgggcagtttgataactatacacccatgcagttggctcagtatgtagcaactattgcaaataatggtgttcgtgtggctcctcgtattgttgaaggcatttatggtaataatgataagggaggactgggtgacttgattcagcaactgcaaccgacagagatgaataaggtcaatatatccgactccgatatgagcatcttgcaccaaggtttttatcaggttgcccatggtactagtggattgacaactggacgtgccttttcaaatggtgccttggtatccattagcggaaaaacaggtacagccgaaagctatgtggcagatggtcagcaagcaaccaataccaatgcggtggcctatgccccatctgataatccccaaatcgctgtcgcagtggtctttcctcataataccaatctaacaaatggtgtaggaccttccattgcgcgtgacattatcaatctgtatcaaaaataccatccaatgaactagaaaggaaattatgct

SEQ ID NO: 1025 - DNA, 1441 bp, Streptococcus pneumoniae
  strain StrR-07
ttgcctctatttcaaaggagatgcctggcattagtatttctacttcttgggatcgaaagattttggaaacttccctttcttctatagtagggagtgtatccagtgaaaaagctggtctcccagcggaagaagcagaatcctatcttaaaaaaggctattctctaaatgaccgtgttggaacctcgtatttggaaaagcaatatgaagagaccttacaaggaaaacgctcggtaaaagaaatccatctggataaatatggcaatatggaaagcgtggacacaattgaggaaggtagtaagggaaacaatatcaaactgaccattgatttggccttccaagatagcgtggatgctttgctgaaaagttatttcaattccgagctaggaaatggtggagccaagtattctgagggtgtgtatgcagtcgcccttaaccccaaaacaggtgctgttttgtctatgtcaggactcaaacatgacctgaaaacgggagagttgactcctgattccttgggaacggtaaccaatgtctttgtcccaggttcggttgtcaaggctgcgaccatcagctctggctgggaaaatggtgttttatcaggaaaccaaaccttaacagatcagcctattgttttccaaggttcagctccaatttattcttggtataaattggcatatggatcttttcctattacagctgtggaagccttggagtattcatccaatgcttacatggttcaaaccgctcttggaatcatgggccagacctatcaaccaaatatgtttgttggaaccagcaatttggaaacagctatgggaaaacttcgtgcgacctttggcgaatatggcttgggggctgcgaccggaattgacctaccagatgaatctactggatttgttcccaaagactatagctttgctaattacatcaccaatgcctttgggcagtttgataactatacgcccatgcagttggctcagtatgtagcaactattgcaaatgatggtgttcgtgtggctcctcgtattgttgaaggcatttatggtaataatgataagggaggactgggtgacttgattcagcaactgcaaccgacagagatgaataaggtcaatatatccgactccgatatgagtatcttgcaccaaggattttaccaagtatcgcatggaactagtccccttacgacaggacgggcgttttcagatggcgccactgtttctatcagtggtaagaccggtacaggtgaaagctatgtagctggtggtcaagaagctaataataccaatgccgtggcctatgctccaacagaaaatcctcaaattgcagttgcagtagtctttcctcataataccaatttaaccaaaaatgttgggccagcaattgctcgcgacattatcaatttatataaccaacaccatccaatgaattagaaaggaagcca

SEQ ID NO: 1026 - DNA, 1443 bp, Streptococcus pneumoniae
  strain StrR-08
tattgcctctatttcaaaggagatgcctggcattagtatttctacttcttgggatcgaaaggttttggaaacttccctttcttctatagtagggagtgtatccagtgaaaaagctggtctcccagcggaagaagcagaatcctatcttaaaaaaggctattctctaaatgaccgtgttggaacctcctatttggaaaagcaatatgaagagaccttacaaggaaaacgctcggtaaaagaaatccatctggataaatatggcaatatggaaagcgtggacacaattgaggaaggtagtaagggaaacaatatcaaactgaccattgatttggccttccaagatagcgtggatgctttgctgaaaagttatttcaattccgagctaggaaatggtggagctaaatattctgaaggtgtctatgcagtcgcccttaacccaaaaacaggtgctgttttatccatgtcagggatcaaacatgacctgaaaacgggagagttgactcctgattccttgggaacggtaaccaatgtctttgtcccaggttcggttgtcaaggctgcgaccatcagctcaggttgggaaaatggtgttttatcaggaaaccaaaccttaacagatcagcctattgttttccaaggttcagctccaatttattcttggtataaattggcatatggatcttttcctattacagctgtggaagccttggagtattcatccaatgcttacatggttcaaaccgctcttggaatcatgggccagacctatcaaccaaatatgtttgttggaaccagcaatttggaaacagctatgggaaaacttcgtgcgacctttggcgaatatggcttgggggctgcgaccggaattgacctaccagatgaatctactggatttgttcccaaagagtatagctttgctaattacatcaccaattcctttgggcagtttgataactatacgcccatgcagttggctcagtatgtagcaactattgcaaataatggtgttcgtgtggctcctcgtattgttgaaggcatttatggtaataatgataagggaggactgggtgacttgattcagcaactgcaaccgacagagatgaataaggtcaatatatccgactccgatatgagcatcttgcaccaaggtttttatcaggttgcccatggtactagtggattgacaactggacgtgccttttcaaatggtgccttggtatccattagcggaaaaacaggtacagccgaaagctatgtggcagatggtcagcaagcaaccaataccaatgcggtggcctatgccccatctgataatccccaaatcgctgtcgcagtggtctttcctcataataccaatctaacaaatggtgtaggaccttccattgcgcgtgacattatcaatctgtatcaaaaataccatccaatgaactagaaaggaaatta

SEQ ID NO: 1027 - DNA, 1443 bp, Streptococcus pneumoniae
  strain StrR-09
tattgcctctatttcaaaggagatgcctggcattagtatttctacttcttgggatagaaaggttttggaaacttccctttcttctatagttgggagtgtatccagtgaaaaagctggtctcccagcggaagaagcagaagcctatcttaaaaaaggctattctctaaatgatcgtgtaggaacctcctatttggaaaagcaatatgaagagaccttacaaggaaaacgctcggtaaaagaaatccatctggataaatatggcaatatggaaagcgtggatacaattgaggaaggtagtaagggaaacaatatcaaactgaccattgatttggctttccaagatagcgtggatgctttactgaaaagttatttcaattccgagctagaaaatggtggagccaagtattctgaaggtgtctatgcagtcgcccttaacccaaaaacaggtgctgttttgtctatgtcagggattaaacatgacttgaaaacgggagatttaacacctgattccttgggaacagtaaccaatgtctttgtcccgggttctgttgtcaaggcggcgaccatcagctctggttgggagaatggagtcttatcaggaaatcagaccttgacagaccaaccgattgtcttccaaggttcagctccgattaattcttggtacactcaggcttacgattcatttccgattacagcggtggaagccttggagtattcttctaatgcctatatggtccaaacagctctaggtcttatggggcagacctaccaacccaatatgtttgtcggcaccagcaatctagagtctgctatggggaaattgcgttcaacctttggtgaatatggcttgggctctgcgactgggattgacctaccagatgaatctactggatttgttcccaaagagtatagctttgctaattacattactaatgcctttgggcagtttgataactatacgccgatgcagttggctcagtatgtagcaactattgcaaatgatggtgttcgtgtggctcctcgtattgtggaaggcatttatggcaataatgataagggaggactgggtgacttgattcagcaactgcaaccgacagagatgaataaggtcaatatatccgactccgatatgagtatcttgcaccaaggtttttatcaggttgctcatgggactagcggattgacaacaggtcgtgccttttccaatggtgcagctgtatccattagtggaaaaacaggtaccgccgaaagttatgtagcaggtggccaagaagccaacaatactaatgctgtagcctatgcaccatcagataatcctcaaatagctgttgctgttgtcttccctcataacaccaatctaacaaatggtgtaggaccttccattgcgcgtgatattatcaatctgtatcaaaaataccatccaatgaactagaaaggaattta

SEQ ID NO: 1028 - DNA, 1446 bp, Streptococcus pneumoniae
  strain StrR-10
tattgcctctatttcaaaggagatgcctggcattagtatttctacctcttgggatagaaaggttttggaaacttctctttcttctatagtagggagtgtatccagtgaaaaagctggtctcccagcggaagaagcagaagcctatcttaaaaaaggctattctctaaatgaccgtgttgggacttcttacctggaaaaacaatacgaggaaaccttacaaggaaaacgctcggtaaaagaaatccatctggataaatatggcaatatggaaagcgtggatacaattgaggaaggtagtaagggaaacaatatcaaactgaccattgatttggccttccaagatagcgtggatgctttgctgaaaagttatttcaattccgagctaggaaatggtggagctaagtattctgaaggcgtgtatgcagtcgcccttaaccccaaaacaggtgctgttttgtctatgtcaggactcaaacatgacctgaaaacgggagacttgacgcctgattccttgggaacggtaaccaatgtctttgtcccagggtcagtagttaaggccgctaccatcagctcaggttgggaaaatggtgttttatcaggaaaccaaaccttaacagatcagcctattgttttccaaggttcagctccaatttattcttggtataaattggcatatggatcttttcctattacagctgtggaagccttggagtattcatctaatgcttacatggttcaaaccgctcttggaatcatgggccagacctatcaaccaaatatgtttgttggaaccagcaatttggaaacagctatgggaaaacttcgtgcgacctttggcgaatatggcttgggggctgcgaccggaattgacctaccagatgaatctactggatttgttcccaaagagtatagctttgctaattacattactaatgcctttgggcagtttgataactatacgccgatgcagttggctcagtatgtagcaactattgcaaatgatggtgttcgtgtggctcctcgtattgttgaaggcatttatggtaataatgataagggaggactgggtgacttgattcagcaactgcaaccgacagagatgaataaggtcaatatatccgactccgatatgagcatcttgcaccaaggtttttatcaggttgcccatggtactagtggattgacaactggacgtgccttttcaaatggcgccttggtatccattagcggaaaaacaggtacagccgaaagctatgtggcagatggtcagcaagcaaccaataccaatgcggtggcctatgccccatctgataatccccaaatcgctgttgcagtggtctttcctcataataccaatctaacaaatggtgtaggaccttccattgcgcgtgacattatcaatctgtatcaaaaataccatccaatgaactagaaaggaaattatgc

SEQ ID NO: 1029 - DNA, 1423 bp, Streptococcus pneumoniae
  strain StrR-11
ttgcctctatttcaaaggagatgcctggcattagtatttctacttcttgggatagaaaggttttggaaacttccctttcttctatagttgggagtgtatccagtgaaaaagctggtctcccagcggaagaagcagaagcctatcttaaaaaaggctattctctaaatgaccgtgtaggaacctcctatttggaaaagcaatatgaagagaccttacaaggaaaacgctcggtaaaagaaatccatctggataaatatggcaatatggaaagcgtggatacaattgaggaaggtagtaagggaaacaatatcaaactgaccattgatttggccttccaagatagcgtggatgctttactgaaaagttatttcaattctgagctagaaaatggtggagccaagtattctgaaggtgtctatgcagtcgcccttaacccaaaaacaggtgcggttttgtctatgtcagggattaaacatgacttgaaaacgggagagttgacgcctgattccttgggaacggtaaccaatgtctttgttccaggttcggttgtcaaggcggcgaccatcagctcaggttgggaaaatggagtcttgtcaggaaaccagaccttgacagaccagtccattgtcttccaaggttcagctcccatcaattcttggtatactcaggcttacggttcattccctatcacagcggtccaagctctggagtattcatccaatgcttatatggtccaaacagccttaggtcttatggggcagacctatcaacccaatatgtttgtcggcaccagcaatctagagtctgctatgggtaaattgcgttcaacctttggcgaatatggcttgggggctgcgactgggattgatctaccagatgaatctactggatttgttcccaaagactataactttgccaatttcattaccaatgcctttgggcagtttgataactataccccaatgcaattggctcagtatgtagcaactattgcaaatgatggtgttcgtgtggctcctcgtattgttgaaggcatttatggtaataatgataagggaggactgggtgacttgattcagcaactgcaaccgacagagatgaataaggtcaatatatccgactccgatatgagtgtcttgcaccaaggtttttatcaggttgctcatgggactagtgggttgacaactggccgtgccttttcaaatggtgccttggtatccattagcggaaaaacgggtacagccgaaagctatgtggcagatggtcaggaagcaaccaataccaatgcggtggcctatgccccatctgataatccccaaatcgctgtcgcagtggtctttcctcataataccaatctaacaaatggtgtaggaccttccattgcgcgtgacattatcaatctgtatcaaaaataccatccaat

SEQ ID NO: 1030 - DNA, 1447 bp, Streptococcus pneumoniae
  strain StrR-12
tattgcctctatttcaaaggagatgcctggcattagtatttctacttcttgggatcgaaaggttttggaaacttccctttcttctatagtagggagtgtatccagtgaaaaagctggtctcccagcggaagaagcagaatcctatcttaaaaaaggctattctctaaatgaccgtgttggaacctcctatttggaaaagcaatatgaagagaccttacaaggaaaacgctcggtaaaagaaatccatctggataaatatggcaatatggaaagcgtggacacaattgaggaaggtagtaagggaaacaatatcaaactgaccattgatttggccttccaagatagcgtggatgctttgctgaaaagttatttcaattccgagctaggaaatggtggagctaaatattctgaaggtgtctatgcagtcgcccttaacccaaaaacaggtgctgttttatccatgtcagggatcaaacatgacctgaaaacgggagagttgactcctgattccttgggaacggtaaccaatgtctttgtcccaggttcggttgtcaaggctgcgaccatcagctcaggttgggaaaatggtgttttatcaggaaaccaaaccttaacagatcagcctattgttttccaaggttcagctccaatttattcttggtataaattggcatatggatcttttcctattacagctgtggaagccttggagtattcatccaatgcttacatggttcaaaccgctcttggaatcatgggccagacctatcaaccaaatatgtttgttggaaccagcaatttggaaacagctatgggaaaacttcgtgcgacctttggcgaatatggcttgggggctgcgaccggaattgacctaccagatgaatctactggatttgttcccaaagagtatagctttgctaattacatcaccaattcctttgggcagtttgataactatacgcccatgcagttggctcagtatgtagcaactattgcaaataatggtgttcgtgtggctcctcgtattgttgaaggcatttatggtaataatgataagggaggactgggtgacttgattcagcaactgcaaccgacagagatgaataaggtcaatatatccgactccgatatgagcatcttgcaccaaggtttttatcaggttgcccatggtactagtggattgacaactggacgtgccttttcaaatggtgccttggtatccattagcggaaaaacaggtacagccgaaagctatgtggcagatggtcagcaagcaaccaataccaatgcggtggcctatgccccatctgataatccccaaatcgctgtcgcagtggtctttcctcataataccaatctaacaaatggtgtaggaccttccattgcgcgtgacattatcaatctgtatcaaaaataccatccaatgaactagaaaggaaattatgct

SEQ ID NO: 1031 - DNA, 1446 bp, Streptococcus pneumoniae
  strain StrR-13
attgcctctatttcaaaggagatgcctggcattagtatttctacctcttgggatagaaaggttttggaaacttctctttcttctatagtagggagtgtatccagtgaaaaagctggtctcccagcggaagaagcagaagcctatcttaaaaaaggctattctctaaatgaccgtgttgggacttcttacctggaaaaacaatacgaggaaaccttacaaggaaaacgctcggtaaaagaaatccatctggataaatatggcaatatggaaagcgtggatacaattgaggaaggtagtaagggaaacaatatcaaactgaccattgatttggccttccaagatagcgtggatgctttgctgaaaagttatttcaattccgagctaggaaatggtggagctaagtattctgaaggcgtgtatgcagtcgcccttaaccccaaaacaggtgctgttttgtctatgtcaggactcaaacatgacctgaaaacgggagacttgacgcctgattccttgggaacggtaaccaatgtctttgtcccagggtcagtagttaaggccgctaccatcagctcaggttgggaaaatggtgttttatcaggaaaccaaaccttaacagatcagcctattgttttccaaggttcagctccaatttattcttggtataaattggcatatggatcttttcctattacagctgtggaagccttggagtattcatctaatgcttacatggttcaaaccgctcttggaatcatgggccagacctatcaaccaaatatgtttgttggaaccagcaatttggaaacagctatgggaaaacttcgtgcgacctttggcgaatatggcttgggggctgcgaccggaattgacctaccagatgaatctactggatttgttcccaaagagtatagctttgctaattacattactaatgcctttgggcagtttgataactatacgccgatgcagttggctcagtatgtagcaactattgcaaatgatggtgttcgtgtggctcctcgtattgttgaaggcatttatggtaataatgataagggaggactgggtgacttgattcagcaactgcaaccgacagagatgaataaggtcaatatatccgactccgatatgagcatcttgcaccaaggtttttatcaggttgcccatggtactagtggattgacaactggacgtgccttttcaaatggcgccttggtatccattagcggaaaaacaggtacagccgaaagctatgtggcagatggtcagcaagcaaccaataccaatgcggtggcctatgccccatctgataatccccaaatcgctgttgcagtggtctttcctcataataccaatctaacaaatggtgtaggaccttccattgcgcgtgacattatcaatctgtatcaaaaataccatccaatgaactagaaaggaaattatgct

SEQ ID NO: 1032 - DNA, 1446 bp, Streptococcus pneumoniae
  strain StrR-14
attgcctctatttcaaaggagatgcctggcattagtatttctacttcttgggatagaaaggttttggaaacttccctttcttctatagttgggagtgtatccagtgaaaaagctggtctcccagcggaagaagcagaagcctatcttaaaaaaggctattctctaaatgatcgtgttggaacctcctatttggaaaagcaatatgaagagaccttacaagggaaacgctcggtaaaagaaatccatctggataaatatggcaatatggaaagtgtggatacaattgaggaaggtagtaagggaaacaatatcaagctgaccattgatttggccttccaagatagcgtggatgctttgctgaaaagttatttcaattccgagctaggaaatggtggagccaagtattctgagggtgtgtatgcagtcgcccttaaccccaaaacaggtgctgttttgtctatgtcaggactcaaacatgacctgaaaacgggagagttgactcctgattccttgggaacggtaaccaatgtctttgtcccaggttcggttgtcaaggctgcgaccatcagctctggctgggaaaatggagtcttatcaggaaaccagaccttgacagaccagtccattgtctttcaaggttcagctcccatcaattcttggtatactcaggcttacggttcattccctatcacagcagtccaagctctggagtattcatctaatgcctatatggtccaaacagctttaggtcttatggggcagacctaccaacctaatatgtttgtcggcaccagcaacctagagtctgctatggggaaattgcgttcaacctttggtgaatatggtttgggttctgcgaccgggattgacctaccagatgaatctactggatttgttcccaaagactatagctttgctaattacatcaccaatgcctttgggcagtttgataactatacgccgatgcagttggctcagtatgtagcaactattgcaaatgatggtgttcgtgtggctcctcgtattgttgaaggcatttatggaaataatgataagggaggcctaggcgacttgattcagcaactgcaaccgacagagatgaataaggtcaatatatccgactctgatatgagtattttgcaccaaggtttttatcaggttgctcatgggactagtggattgacaactggacgtgccttttcaaatggcgcagcggtatccattagtggaaaaacaggtactgccgaaagttatgttgagggtggtcaagaagctaacaatactaatgctgtggcctatgcaccatcagataatcctcaaatcgctgtagctgttgtcttccctcataacaccaaccttacaaatggtgtcggaccttccattgcgcgcgatattatcaacctctataaccaacatcatccaatgaattagaaaggaacatatgct

SEQ ID NO: 1033 - DNA, 1446 bp, Streptococcus pneumoniae
  strain StrR-15
tattgcctctatttcaaaggagatgcctggcattagtatttctacttcttgggatagaaaggttttggaaacttccctttcttctatagttgggagtgtatccagtgaaaaagctggtctcccagcggaagaagcagaagcctatcttaaaaaaggctattctctaaatgaccgtgttggaacctcgtatttggaaaagcaatatgaagagaccttacaaggaaaacgctcggtaaaagaaatccatctggataaatatggcaatatggaaagcgtggatacaattgaggaaggtagtaagggaaacaatatcaagctgaccattgatttggccttccaagatagcgtggatgctttgctgaaaagttatttcaattccgagctaggaaatggtggagccaagtattctgagggtgtgtatgcagtcgcccttaaccccaaaacaggtgctgttttgtctatgtcaggactcaaacatgacctgaaaacgggagagttgactcctgattccttgggaacggtaaccaatgtctttgtcccaggttcggttgttaaggccgctaccatcagctcaggttgggaaaatggtgttttatcaggaaaccaaaccttaacagatcagcctattgttttccaaggttcagctccaatttattcttggtataaattggcatatggatcttttcctattacagctgtggaagccttggagtattcatccaatgcttacatggttcaaaccgctcttggaatcatgggccagacctatcaaccaaatatgtttgttggaaccagcaatttggaaacagctatgggaaaacttcgtgcgacctttggcgaatatggcttgggggctgcgaccggaattgacctaccagatgaatctactggatttgttcccaaagagtatagctttgctaattacatcaccaatgcctttgggcagtttgataactatacgcccatgcagttggctcagtatgtagcaactattgcaaatgatggtgttcgtgtggctcctcgtattgttgaaggcatttatggtaataatgataagggaggactgggtgacttgattcagcaactgcaaccgacagagatgaataaggtcaatatatccgactccgatatgagtatcttgcaccaaggtttttatcaggttgctcatgggactagtggattgacaactggacgtgctttttcaaatggtgccttggtatccattagtgggaaaacaggtactgccgaaagttatgttgcaggtggtcaagaagccaacaataccaacgcggtggcctatgccccatcagataatcctcaaatcgctgttgccgttgtcttccctcataacaccaatctaacaaatggtgttggaccttctattgcacgcgatattatcaacctctataaccaacaccatccaatgaattagaaaggaacttatgc

SEQ ID NO: 1034 - DNA, 1670 bp, Streptococcus pneumoniae
  strain StrR-01
ggaaactgcagaggtcaaggggattgattttacaaccagtcccaatcgtagttatccaaacggacaatttgcttctagttttatcggactagctcagctccatgaaaatgaagatggcagcaagagcttactgggaacctctggaatggagagttccttgaacagtattcttgcagggacagacggtattattacctatgaaaaagaccgtgtaggaaatatcgtaccaggtacagaactggtatcgcaacaaactgtggatggcaaggatgtttatacaacattgtctagtccgctacaatctttcatggaaactcagatggatgcctttctagaaaaagtaaaaggtaagtatatgaccgcgaccttggtcagtgcaaagaccggtgaaatcctcgctaccacccaacgacctacctttaatgcagatactaaagaaggaatcactgaggactttgtttggcgtgatattctttatcaaagtaactatgaaccaggatcagccatgaaggttatgacgttagcttcttctattgataataataccttcccaagtggagaatacttcaatagcagtgaattcaaaatagcggatgcgacgactcgagattgggatgttaatgatggtttgactactggtgggatgatgactttcttacaaggtttcgctcactccagtaatgttggaatgagtctacttgaacaaaaaatgggagatgctacttggttggattatctaaaacgctttaaatttggggttccaactcgctttggcttgacagatgaatacgctggtcaacttccagctgataatattgttagtattgctcaaagctcatttgggcaaggaatttcagtgacacaaacacaaatgcttcgtgcctttacagctattgctaatgatggagttatgctggagccaaaatttataagtgctatttatgatactaacaatcagtctgtacgtaagtcacaaaaagaaatagtaggaaatcctgtttccaaagaggcagcaagcacaactcgaaatcacatgatcttagttgggacggaccctctatatggaactatgtataatcactacacaggaaagccaattataacagttcctggacaaaatgtagcagttaaatccggtacggctcaaatcgctgatgagaaaaatggaggatacttggttggttctaccaattatattttctcagttgtgactatgaatcctgctgaaaatcctgattttatcttgtatgtaacggttcaacagcctgagcattattcaggtatccagttgggagaatttgccaccccaatcttggagcgggcttcagctatgaaagaatctctcaatcttcaatctccagccaaaaatttagataaagttacgacagaatcttcttatgcaatgcctagcatcaaggatatttcacctggtgagttggcggaagccttacgccgaaatattgtgcaaccaatcgttgtaggtactggaacaaagattaaagagacttctgtagaagaagggaccaatcttgcaccaaaccaacaagttctccttttatcggataaggtagaagaaattccagacatgtatggctggaaaaaagagactgccgagacctttgctaaatggttggatattgaactggaatttgaaggttcaggttccgttg

SEQ ID NO: 1035 - DNA, 1683 bp, Streptococcus pneumoniae
  strain StrR-02
aaagaattggaaactgcagaggtcaaggggattgattttacaaccagtcccaatcgtagttacccaaatggacaatttgcttctagttttatcggtctagctcagctccatgaaaatgaagatggaagcaagagtttgctgggaacctctggaatggagagttccttgaacagtattcttgcagggacagacggcattattacctatgaaaaggatcgtctgggcaatattgtacccggaacagaacaagtttcccaacaaacggtggatggcaaggatgtttacacaaccatttccagccccctccagtccttcatggaaactcagatggatgcctttctagaaaaagtaaaaggtaagtatatgaccgcgaccttggtcagtgcaaagaccggtgaaatcctcgctaccacccaacgacctacctttaatgcagatactaaagaaggaatcactgaggactttgtttggcgtgatattctttatcaaagtaactatgaaccaggatcagccatgaaggttatgacgttagcttcttctattgataataataccttcccaagtggagaatacttcaatagcagtgaattcaaaatagcggatgcgacgactcgagattgggatgttaatgatggtttgactactggtgggatgatgactttcttacaaggtttcgctcactccagtaatgttggaatgagtctacttgaacaaaaaatgggagatgctacttggttggattatctaaaacgctttaaatttggggttccaactcgctttggcttgacagatgaatacgctggtcaacttccagctgataatattgttagtattgctcaaagctcatttgggcaaggaatttcagtgacacaaacacaaatgcttcgtgcctttacagctattgctaatgatggagttatgctggagccaaaatttataagtgctatttatgatactaacaatcagtctgtacgtaagtcacaaaaagaaatagtaggaaatcctgtttccaaagaggcagcaagcacaactcgaaatcacatgatcttagttgggacggaccctctatatggaactatgtataatcactacacaggaaagccaattataacagttcctggacaaaatgtagcagttaaatccggtacggctcaaatcgctgatgagaaaaatggaggatacttggttggttctaccaattatattttctcagttgtgactatgaatcctgctgaaaatcctgattttatcttgtatgtaacggttcaacagcctgagcattattcaggtatccagttgggagaatttgccaccccaatcttggagcgggcttcagctatgaaagaatctctcaatcttcaatctccagccaaaaatttagataaagttacgacagaatcttcttatgcaatgcctagcatcaaggatatttcacctggtgagttggcggaagccttacgccgaaatattgtgcaaccaatcgttgtaggtactggaacaaagattaaagagacttctgtagaagaagggaccaatcttgcaccaaaccaacaagttctccttttatcggataaggtagaagaaattccagacatgtatggctggaaaaaagagactgccgagacctttgctaaatggttggatattgaactggaatttgaaggttcaggttccgttgttcag

SEQ ID NO: 1036 - DNA, 1682 bp, Streptococcus pneumoniae
  strain StrR-03
tcaaaaaagaattggaaactgcagaggtcaaggggattgattttacaaccagtcccaatcgtagttacccaaatggacaatttgcttctagttttatcggtctagctcagctccatgaaaatgaagatggaagcaagagtttgctgggaacctctggaatggagagttccttgaacagtattcttgcagggacagacggcattattacctatgaaaaggatcgtctgggcaatattgtacccggaacagaacaagtttcccaacaaacggtggatggcaaggatgtttacacaaccatttccagccccctccagtccttcatggaaactcagatggatgcctttctagaaaaagtaaaaggtaagtatatgaccgcgaccttggtcagtgcaaagaccggtgaaatcctcgctaccacccaacgacctacctttaatgcagatactaaagaaggaatcactgaggactttgtttggcgtgatattctttatcaaagtaactatgaaccaggatcagccatgaaggttatgacgttagcttcttctattgataataataccttcccaagtggagaatacttcaatagcagtgaattcaaaatagcggatgcgacgactcgagattgggatgttaatgatggtttgactactggtgggatgatgactttcttacaaggtttcgctcactccagtaatgttggaatgagtctacttgaacaaaaaatgggagatgctacttggttggattatctaaaacgctttaaatttggggttccaactcgctttggcttgacagatgaatacgctggtcaacttccagctgataatattgttagtattgctcaaagctcatttgggcaaggaatttcagtgacacaaacacaaatgcttcgtgcctttacagctattgctaatgatggagttatgctggagccaaaatttataagtgctatttatgatactaacaatcagtctgtacgtaagtcacaaaaagaaatagtaggaaatcctgtttccaaagaggcagcaagcacaactcgaaatcacatgatcttagttgggacggaccctctatatggaactatgtataatcactacacaggaaagccaattataacagttcctggacaaaatgtagcagttaaatccggtacggctcaaatcgctgatgagaaaaatggaggatacttggttggttctaccaattatattttctcagttgtgactatgaatcctgctgaaaatcctgattttatcttgtatgtaacggttcaacagcctgagcattattcaggtatccagttgggagaatttgccaccccaatcttggagcgggcttcagctatgaaagaatctctcaatcttcaatctccagccaaaaatttagataaagttacgacagaatcttcttatgcaatgcctagcatcaaggatatttcacctggtgagttggcggaagccttacgccgaaatattgtgcaaccaatcgttgtaggtactggaacaaagattaaagagacttctgtagaagaagggaccaatcttgcaccaaaccaacaagttctccttttatcggataaggtagaagaaattccagacatgtatggctggaaaaaagagactgccgagacctttgctaaatggttggatattgaactggaatttgaaggttcaggttccgtt

SEQ ID NO: 1037 - DNA, 1681 bp, Streptococcus pneumoniae
  strain StrR-04
caaaaaagaattggaaactgcagaggtcaaggggattgattttacaaccagtcccaatcgtagttatccaaacggacaatttgcttctagttttatcggactagctcagctccatgaaaatgaagatggcagcaagagcttactgggaacctctggaatggagagttccttgaacagtattcttgcagggacagacggtattattacctatgaaaaagaccgtgtaggaaatatcgtaccaggtacagaactggtatcgcaacaaactgtggatggcaaggatgtttatacaacattgtctagtccgctacaatctttcatggaaactcagatggatgcctttctagaaaaagtaaaaggtaagtatatgaccgcgaccttggtcagtgcaaagaccggtgaaatcctcgctaccacccaacgacctacctttaatgcagatactaaagaaggaatcactgaggactttgtttggcgtgatattctttatcaaagtaactatgaaccaggatcagccatgaaggttatgacgttagcttcttctattgataataataccttcccaagtggagaatacttcaatagcagtgaattcaaaatagcggatgcgacgactcgagattgggatgttaatgatggtttgactactggtgggatgatgactttcttacaaggtttcgctcactccagtaatgttggaatgagtctacttgaacaaaaaatgggagatgctacttggttggattatctaaaacgctttaaatttggggttccaactcgctttggcttgacagatgaatacgctggtcaacttccagctgataatattgttagtattgctcaaagctcatttgggcaaggaatttcagtgacacaaacacaaatgcttcgtgcctttacagctattgctaatgatggagttatgctggagccaaaatttataagtgctatttatgatactaacaatcagtctgtacgtaagtcacaaaaagaaatagtaggaaatcctgtttccaaagaggcagcaagcacaactcgaaatcacatgatcttagttgggacggaccctctatatggaactatgtataatcactacacaggaaagccaattataacagttcctggacaaaatgtagcagttaaatccggtacggctcaaatcgctgatgagaaaaatggaggatacttggttggttctaccaattatattttctcagttgtgactatgaatcctgctgaaaatcctgattttatcttgtatgtaacggttcaacagcctgagcattattcaggtatccagttgggagaatttgccaccccaatcttggagcgggcttcagctatgaaagaatctctcaatcttcaatctccagccaaaaatttagataaagttacgacagaatcttcttatgcaatgcctagcatcaaggatatttcacctggtgagttggcggaagccttacgccgaaatattgtgcaaccaatcgttgtaggtactggaacaaagattaaagagacttctgtagaagaagggaccaatcttgcaccaaaccaacaagttctccttttatcggataaggtagaagaaattccagacatgtatggctggaaaaaagagactgccgagacctttgctaaatggttggatattgaactggaatttgaaggttcaggttccgtt

SEQ ID NO: 1038 - DNA, 1685 bp, Streptococcus pneumoniae
  strain StrR-05
aaaaaagaattggaaactgcagaggtcaaggggattgattttacaaccagtcccaatcgtagttatccaaacggacaatttgcttctagttttatcggactagctcagctccatgaaaatgaagatggcagcaagagcttactgggaacctctggaatggagagttccttgaacagtattcttgcagggacagacggtattattacctatgaaaaagaccgtgtaggaaatatcgtaccaggtacagaactggtatcgcaacaaactgtggatggcaaggatgtttatacaacattgtctagtccgctacaatctttcatggaaactcagatggatgcctttctagaaaaagtaaaaggtaagtatatgaccgcgaccttggtcagtgcaaagaccggtgaaatcctcgctaccacccaacgacctacctttaatgcagatactaaagaaggaatcactgaggactttgtttggcgtgatattctttatcaaagtaactatgaaccaggatcagccatgaaggttatgacgttagcttcttctattgataataataccttcccaagtggagaatacttcaatagcagtgaattcaaaatagcggatgcgacgactcgagattgggatgttaatgatggtttgactactggtgggatgatgactttcttacaaggtttcgctcactccagtaatgttggaatgagtctacttgaacaaaaaatgggagatgctacttggttggattatctaaaacgctttaaatttggggttccaactcgctttggcttgacagatgaatacgctggtcaacttccagctgataatattgttagtattgctcaaagctcatttgggcaaggaatttcagtgacacaaacacaaatgcttcgtgcctttacagctattgctaatgatggagttatgctggagccaaaatttataagtgctatttatgatactaacaatcagtctgtacgtaagtcacaaaaagaaatagtaggaaatcctgtttccaaagaggcagcaagcacaactcgaaatcacatgatcttagttgggacggaccctctatatggaactatgtataatcactacacaggaaagccaattataacagttcctggacaaaatgtagcagttaaatccggtacggctcaaatcgctgatgagaaaaatggaggatacttggttggttctaccaattatattttctcagttgtgactatgaatcctgctgaaaatcctgattttatcttgtatgtaacggttcaacagcctgagcattattcaggtatccagttgggagaatttgccaccccaatcttggagcgggcttcagctatgaaagaatctctcaatcttcaatctccagccaaaaatttagataaagttacgacagaatcttcttatgcaatgcctagcatcaaggatatttcacctggtgagttggcggaagccttacgccgaaatattgtgcaaccaatcgttgtaggtactggaacaaagattaaagagacttctgtagaagaagggaccaatcttgcaccaaaccaacaagttctccttttatcggataaggtagaagaaattccagacatgtatggctggaaaaaagagactgccgagacctttgctaaatggttggatattgaactggaatttgaaggttcaggttccgttgttca

SEQ ID NO: 1039 - DNA, 1679 bp, Streptococcus pneumoniae
  strain StrR-06
aaaagaattggaaactgcagaggtcaaggggattgattttacaaccagtcccaatcgtagttatccaaacggacaatttgcttctagttttatcggactagctcagctccatgaaaatgaagatggcagcaagagcttactgggaacctctggaatggagagttccttgaacagtattcttgcagggacagacggtattattacctatgaaaaagaccgtgtaggaaatatcgtaccaggtacagaactggtatcgcaacaaactgtggatggcaaggatgtttatacaacattgtctagtccgctacaatctttcatggaaactcagatggatgcctttctagaaaaagtaaaaggtaagtatatgaccgcgaccttggtcagtgcaaagaccggtgaaatcctcgctaccacccaacgacctacctttaatgcagatactaaagaaggaatcactgaggactttgtttggcgtgatattctttatcaaagtaactatgaaccaggatcagccatgaaggttatgacgttagcttcttctattgataataataccttcccaagtggagaatacttcaatagcagtgaattcaaaatagcggatgcgacgactcgagattgggatgttaatgatggtttgactactggtgggatgatgactttcttacaaggtttcgctcactccagtaatgttggaatgagtctacttgaacaaaaaatgggagatgctacttggttggattatctaaaacgctttaaatttggggttccaactcgctttggcttgacagatgaatacgctggtcaacttccagctgataatattgttagtattgctcaaagctcatttgggcaaggaatttcagtgacacaaacacaaatgcttcgtgcctttacagctattgctaatgatggagttatgctggagccaaaatttataagtgctatttatgatactaacaatcagtctgtacgtaagtcacaaaaagaaatagtaggaaatcctgtttccaaagaggcagcaagcacaactcgaaatcacatgatcttagttgggacggaccctctatatggaactatgtataatcactacacaggaaagccaattataacagttcctggacaaaatgtagcagttaaatccggtacggctcaaatcgctgatgagaaaaatggaggatacttggttggttctaccaattatattttctcagttgtgactatgaatcctgctgaaaatcctgattttatcttgtatgtaacggttcaacagcctgagcattattcaggtatccagttgggagaatttgccaccccaatcttggagcgggcttcagctatgaaagaatctctcaatcttcaatctccagccaaaaatttagataaagttacgacagaatcttcttatgcaatgcctagcatcaaggatatttcacctggtgagttggcggaagccttacgccgaaatattgtgcaaccaatcgttgtaggtactggaacaaagattaaagagacttctgtagaagaagggaccaatcttgcaccaaaccaacaagttctccttttatcggataaggtagaagaaattccagacatgtatggctggaaaaaagagactgccgagacctttgctaaatggttggatattgaactggaatttgaaggttcaggttccgttg

SEQ ID NO: 1040 - DNA, 1685 bp, Streptococcus pneumoniae
  strain StrR-07
taaaaaggatctaaaagacgctagtgttgaaggaattgacttcacaactagccctaatagaagctatccaaatggacaattcgcttctagttttattggtttggcccaactccatgaaaatgaggatggtagcaagagtttgctgggaacttctgggatggagagttccttgaacagtattcttgcagggaaagacggtattattacctatgaaaaagatcgtctgggtaatattgtccctggaacagaacaagtttcccaacaaacggtagatggcaaggatgtttatacaacattgtctagtccgctacaatctttcatggaaactcagatggatgcctttctagaaaaagtaaaaggtaagtatatgaccgcgaccttggtcagtgcaaagaccggtgaaatcctcgctaccacccaacgacctacctttaatgcagatactaaagaaggaatcactgaggactttgtttggcgtgatattctttatcaaagtaactatgaaccaggatcagccatgaaggttatgacgttagcttcttctattgataataataccttcccaagtggagaatacttcaatagcagtgaattcaaaatagcggatgcgacgactcgagattgggatgttaatgaaggtttgactactggtgggatgatgactttcttacaaggtttcgctcactccagtaatgttggaatgagtctacttgaacaaaaaatgggagatgctacttggttggattatctaaaacgctttaaatttggggttccaactcgctttggcttgacagatgaatacgctggtcaacttccagctgataatattgttagtattgctcaaagctcatttgggcaaggaatttcagtgacacaaacacaaatgcttcgtgcctttacagctattgctaatgatggagttatgctggagccaaaatttataagtgctatttatgatactaacaatcagtctgtacgtaagtcacaaaaagaaatagtaggaaatcctgtttccaaagaggcagcaagcacaactcgaaatcacatgatcttagttgggacggaccctctatatggaactatgtataatcactacacaggaaagccaattataacagttcctggacaaaatgtagcagttaaatccggtacggctcaaatcgctgatgagaaaaatggaggatacttggttggttctaccaattatattttctcagctgtgactatgaatcctgctgaaaatcctgattttatcttgtatgtaacggttcaacagcctgagcattattcaggtatccagttgggagaatttgccaccccaatcttggagcgggcttcagctatgaaagaatctctcaatcttcaatctccagccaaaaatttagataaagttacgacagaatcttcttatgcaatgcctagcatcaaggatatttcacctggtgagttggcggaagccttacgccgaaatattgtgcaaccaatcgttgtaggtactggaacaaagattaaagagacttctgtagaagaagggaccaatcttgcaccaaaccaacaagttctccttttatcggataaggtagaagaaattccagacatgtatggctggaaaaaagagactgccgagacctttgctaaatggttggatattgaactggaatttgaaggttcaggttccgtcgttc

SEQ ID NO: 1041 - DNA, 1696 bp, Streptococcus pneumoniae
  strain StrR-08
gtctatcaaaaaagaattggaaactgcagaggtcaaggggattgattttacaaccagtcccaatcgtagttatccaaacggacaatttgcttctagttttatcggactagctcagctccatgaaaatgaagatggcagcaagagcttactgggaacctctggaatggagagttccttgaacagtattcttgcagggacagacggtattattacctatgaaaaagaccgtgtaggaaatatcgtaccaggtacagaactggtatcgcaacaaactgtggatggcaaggatgtttatacaacattgtctagtccgctacaatctttcatggaaactcagatggatgcctttctagaaaaagtaaaaggtaagtatatgaccgcgaccttggtcagtgcaaagaccggtgaaatcctcgctaccacccaacgacctacctttaatgcagatactaaagaaggaatcactgaggactttgtttggcgtgatattctttatcaaagtaactatgaaccaggatcagccatgaaggttatgacgttagcttcttctattgataataataccttcccaagtggagaatacttcaatagcagtgaattcaaaatagcggatgcgacgactcgagattgggatgttaatgatggtttgactactggtgggatgatgactttcttacaaggtttcgctcactccagtaatgttggaatgagtctacttgaacaaaaaatgggagatgctacttggttggattatctaaaacgctttaaatttggggttccaactcgctttggcttgacagatgaatacgctggtcaacttccagctgataatattgttagtattgctcaaagctcatttgggcaaggaatttcagtgacacaaacacaaatgcttcgtgcctttacagctattgctaatgatggagttatgctggagccaaaatttataagtgctatttatgatactaacaatcagtctgtacgtaagtcacaaaaagaaatagtaggaaatcctgtttccaaagaggcagcaagcacaactcgaaatcacatgatcttagttgggacggaccctctatatggaactatgtataatcactacacaggaaagccaattataacagttcctggacaaaatgtagcagttaaatccggtacggctcaaatcgctgatgagaaaaatggaggatacttggttggttctaccaattatattttctcagttgtgactatgaatcctgctgaaaatcctgattttatcttgtatgtaacggttcaacagcctgagcattattcaggtatccagttgggagaatttgccaccccaatcttggagcgggcttcagctatgaaagaatctctcaatcttcaatctccagccaaaaatttagataaagttacgacagaatcttcttatgcaatgcctagcatcaaggatatttcacctggtgagttggcggaagccttacgccgaaatattgtgcaaccaatcgttgtaggtactggaacaaagattaaagagacttctgtagaagaagggaccaatcttgcaccaaaccaacaagttctccttttatcggataaggtagaagaaattccagacatgtatggctggaaaaaagagactgccgagacctttgctaaatggttggatattgaactggaatttgaaggttcaggttccgttgttcagaag

SEQ ID NO: 1042 - DNA, 1689 bp, Streptococcus pneumoniae
  strain StrR-09
aaaaaagagttggaaactgcagaggtcaaggggattgattttacaaccagtcccaatcgtagttacccaaacggacaatttgcttctagttttatcggactagctcagctccatgaaaatgaagatggcagcaagagcttgctgggaacctctggaatggagagttccttgaacagtattcttgcagggacagacggcattattacctatgaaaaggatcgtctgggaaatattgtccccggaacggaacaagtttcccaacaaactgtagatggcaaggatgtttatacgactatttccagcacccttcagtccttcatggaaactcagatggatgcctttctagaaaaagtaaaaggtaagtatatgaccgcgaccttggtcagtgcaaagaccggtgaaatcctcgctaccacccaacgacctacctttaatgcagatactaaagaaggaatcactgaggactttgtttggcgtgatattctttatcaaagtaactatgaaccaggatcagccatgaaggttatgacgttagcttcttctattgataataataccttcccaagtggagaatacttcaatagcagtgaattcaaaatagcggatgcgacgactcgagattgggatgttaatgatggtttgactactggtgggatgatgactttcttacaaggtttcgctcactccagtaatgttggaatgagtctacttgaacaaaaaatgggagatgctacttggttggattatctaaaacgctttaaatttggggttccaactcgctttggcttgacagatgaatacgctggtcaacttccagctgataatattgttagtattgctcaaagctcatttgggcaaggaatttcagtgacacaaacacaaatgcttcgtgcctttacagctattgctaatgatggagttatgctggagccaaaatttataagtgctatttatgatactaacaatcagtctgtacgtaagtcacaaaaagaaatagtaggaaatcctgtttccaaagaggcagcaagcacaactcgaaatcacatgatcttagttgggacggaccctctatatggaactatgtataatcactacacaggaaagccaattataacagttcctggacaaaatgtagcagttaaatccggtacggctcaaatcgctgatgagaaaaatggaggatacttggttggttctaccaattatattttctcagttgtgactatgaatcctgctgaaaatcctgattttatcttgtatgtaacggttcaacagcctgagcattattcaggtatccagttgggagaatttgccaccccaatcttggagcgggcttcagctatgaaagactctctcaatcttcaaacaacagctaaagctttggagcaagtaagtcaacaaagtccttatcctatgcctagtgtcaaggatatttcacctggtgatttagcagaagaattgcgtcgcaatcttgtacaacccatcgttgtgggaacaggaacgaagattaaaaacagttctgctgaagaagggaagaatcttgccccgaatcagcaagtccttatcttatctgataaagtagaggaagttccagatatgtatggttggacaaaggagactgctgagacccttgctaagtggctcaatatagaacttgaatttcaaggttcgggttctactgtgcagaag

SEQ ID NO: 1043 - DNA, 1690 bp, Streptococcus pneumoniae
  strain StrR-10
caaaaaagagttggaaactgcagaggtcaaggggattgattttacaaccagtcctaatcgtagttacccaaacggacaatttgcttctagttttatcggtctagctcaactccatgaaaatgaagatggaagcaagagtttgctgggaacttctggaatggagagttccttgaacagtattcttgcagggaaagacggtattattacttatgaaaaggatcgtctgggtaatattgtccctggaacagaacaagtttcccaacaaacggtagatggcaaggatgtttatacaacattgtctagtccgctccaatctttcatggaaactcagatggatgcctttctagaaaaagtaaaaggtaagtatatgaccgcgaccttggtcagtgcaaagaccggtgaaatcctcgctaccacccaacgacctacctttaatgcagatactaaagaaggaatcactgaggactttgtttggcgtgatattctttatcaaagtaactatgaaccaggatcagccatgaaggttatgacgttagcttcttctattgataataataccttcccaagtggagaatacttcaatagcagtgaattcaaaatagcggatgcgacgactcgagattgggatgttaatgatggtttgactactggtgggatgatgactttcttacaaggtttcgctcactccagtaatgttggaatgagtctacttgaacaaaaaatgggagatgctacttggttggattatctaaaacgctttaaatttggggttccaactcgctttggcttgacagatgaatacgctggtcaacttccagctgataatattgttagtattgctcaaagctcatttgggcaaggaatttcagtgacacaaacacaaatgcttcgtgcctttacagctattgctaatgatggagttatgctggagccaaaatttataagtgctatttatgatactaacaatcagtctgtacgtaagtcacaaaaagaaatagtaggaaatcctgtttccaaagaggcagcaagcacaactcgaaatcacatgatcttagttgggacggaccctctatatggaactatgtataatcactacacaggaaagccaattataacagttcctggacaaaatgtagcagttaaatccggtacggctcaaatcgctgatgagaaaaatggaggatacttggttggttctaccaattatattttctcagttgtgactatgaatcctgctgaaaatcctgattttatcttgtatgtaacggttcaacagcctgagcattattcaggtatccagttgggagaatttgccaccccaatcttggagcgggcttcagctatgaaagaatctctcaatcttcaatctccagccaaaaatttagataaagttacgacagaatcttcttatgcaatgcctagcatcaaggatatttcacctggtgagttggcggaagccttacgccgaaatattgtgcaaccaatcgttgtaggtactggaacaaagattaaagagacttctgtagaagaagggaccaatcttgcaccaaaccaacaagttctccttttatcggataaggtagaagaaattccagacatgtatggctggaaaaaagagactgccgagacctttgctaaatggttggatattgaactggaatttgaaggttcaggttccgttgttcagaag

SEQ ID NO: 1044 - DNA, 1668 bp, Streptococcus pneumoniae
  strain StrR-11
agttggaaactgcagaggtcaaggggattgattttacaaccagtcctaatcgtagttacccaaacggacaatttgcttctagttttatcggactagctcagctccatgaaaatgaagatggcagcaagagcttgctgggaacctctgggatggagagttctttaaatagaattcttgcagggacagacggcattattacctatgaaaaggatcgtctgggaaatattgtccccggaacggaacaagtttcccaacaaacggtagatggcaaggatgtttatacgactatttccagcacccttcagtccttcatggagacccagatgaatgcctttcaagaaaaagtaaaaggcaagtatatgacggctaccttggtcagtgctaaaacaggggaaattcttgcaacaacgcaacggccgaccttcgatgctgatactaaggaaggacttaccaaggactttgtttggcgtgatatcctctatcaaagtaactatgagccagggtcaaccatgaaggtcatgacgcttgctgctgctattgataataacactttcccaggaggagaagttttcaatagtagtgaattaaaaatagcggatgcgacaattcgagattgggatgttaatgatggtttgacgactggtgggatgatgactttcttacaaggtttcgctcactccagtaatgttggaatgagtctacttgaacaaaaaatgggagatgctacttggttggattatctaaaccgctttaagtttggggtgccgacgcgttttggtctgactgatgagtattcaggtcaattgcctgcagataatattgttaatattgccatgagtgcatttggtcaggggatttcagtgacccagacgcaaatgattcgtgcctttacagctattgctaatgatggtgttatgctggagcctaaatttattagtgccatttatgatccaaatgatcaaactgctcggaaatctcaaaaagaaattgtgggaaatcctgtttctaaagatgcagctagtctaactcggactaacatgattttggtagggacggatccggtttatggaaccatgtataaccacagcacaggtaagccaactgtaactgttcctgggcaaaatgtagccctcaagtctggtacggctcagattgctgacgagaaaaatggtggttatctagtcgggttaaccaactatattttctcggctgtatcgatgaatccggctgaaaatcctgattttatcttgtatgtaacggtacagcaacctgaacattattcaggtatccagttgggagaatttgccaccccaatcttggagcgggcttcagctatgaaagaatctctcaatcttcaatctccagccaagaatttagataaagttacgacagaatcttcttatgcaatgcctagcatcaaggatatttcacctggtgagttggcggaagccttacgccgaaatattgtgcaaccaatcgttgtaggtactggaacaaagattaaagagacttctgtagaagaagggaccaatcttgcaccaaaccaacaagttctccttttatcggataaggtagaagaaattccagacatgtatggctggaaaaaagagactgctgaaacctttgctaaatggttggatattgagctggaatttgaagggtcaggtt

SEQ ID NO: 1045 - DNA, 1680 bp, Streptococcus pneumoniae
  strain StrR-12
ttggaaactgcagaggtcaaggggattgattttacaaccagtcccaatcgtagttacccaaatggacaatttgcttctagttttatcggtctagctcagctccatgaaaatgaagatggaagcaagagtttgctgggaacctctggaatggagagttccttgaacagtattcttgcagggacagacggcattattacctatgaaaaggatcgtctgggcaatattgtacccggaacagaacaagtttcccaacaaacggtggatggcaaggatgtttacacaaccatttccagccccctccagtccttcatggaaactcagatggatgcctttctagaaaaagtaaaaggtaagtatatgaccgcgaccttggtcagtgcaaagaccggtgaaatcctcgctaccacccaacgacctacctttaatgcagatactaaagaaggaatcactgaggactttgtttggcgtgatattctttatcaaagtaactatgaaccaggatcagccatgaaggttatgacgttagcttcttctattgataataataccttcccaagtggagaatacttcaatagcagtgaattcaaaatagcggatgcgacgactcgagattgggatgttaatgatggtttgactactggtgggatgatgactttcttacaaggtttcgctcactccagtaatgttggaatgagtctacttgaacaaaaaatgggagatgctacttggttggattatctaaaacgctttaaatttggggttccaactcgctttggcttgacagatgaatacgctggtcaacttccagctgataatattgttagtattgctcaaagctcatttgggcaaggaatttcagtgacacaaacacaaatgcttcgtgcctttacagctattgctaatgatggagttatgctggagccaaaatttataagtgctatttatgatactaacaatcagtctgtacgtaagtcacaaaaagaaatagtaggaaatcctgtttccaaagaggcagcaagcacaactcgaaatcacatgatcttagttgggacggaccctctatatggaactatgtataatcactacacaggaaagccaattataacagttcctggacaaaatgtagcagttaaatccggtgcggctcaaatcgctgatgagaaaaatggaggatacttggttggttctaccaattatattttctcagttgtgactatgaatcctgctgaaaatcctgattttatcttgtatgtaacggttcaacagcctgagcattattcaggtatccagttgggagaatttgccaccccaatcttggagcgggcttcagctatgaaagaatctctcaatcttcaatctccagccaaaaatttagataaagttacgacagaatcttcttatgcaatgcctagcatcaaggatatttcacctggtgagttggcggaagccttacgccgaaatattgtgcaaccaatcgttgtaggtactggaacaaagattaaagagacttctgtagaagaagggaccaatcttgcaccaaaccaacaagttctccttttatcggataaggtagaagaaattccagacatgtatggctggaaaaaagagactgccgagacctttgctaaatggttggatattgaactggaatttgaaggttcaggttccgttgttcagaag

SEQ ID NO: 1046 - DNA, 1689 bp, Streptococcus pneumoniae
  strain StrR-13
aaaaaagagttggaaactgcagaggtcaaggggattgattttacaaccagtcctaatcgtagttacccaaacggacaatttgcttctagttttatcggtctagctcaactccatgaaaatgaagatggaagcaagagtttgctgggaacttctggaatggagagttccttgaacagtattcttgcagggaaagacggtattattacttatgaaaaggatcgtctgggtaatattgtccctggaacagaacaagtttcccaacaaacggtagatggcaaggatgtttatacaacattgtctagtccgctccaatctttcatggaaactcagatggatgcctttctagaaaaagtaaaaggtaagtatatgaccgcgaccttggtcagtgcaaagaccggtgaaatcctcgctaccacccaacgacctacctttaatgcagatactaaagaaggaatcactgaggactttgtttggcgtgatattctttatcaaagtaactatgaaccaggatcagccatgaaggttatgacgttagcttcttctattgataataataccttcccaagtggagaatacttcaatagcagtgaattcaaaatagcggatgcgacgactcgagattgggatgttaatgatggtttgactactggtgggatgatgactttcttacaaggtttcgctcactccagtaatgttggaatgagtctacttgaacaaaaaatgggagatgctacttggttggattatctaaaacgctttaaatttggggttccaactcgctttggcttgacagatgaatacgctggtcaacttccagctgataatattgttagtattgctcaaagctcatttgggcaaggaatttcagtgacacaaacacaaatgcttcgtgcctttacagctattgctaatgatggagttatgctggagccaaaatttataagtgctatttatgatactaacaatcagtctgtacgtaagtcacaaaaagaaatagtaggaaatcctgtttccaaagaggcagcaagcacaactcgaaatcacatgatcttagttgggacggaccctctatatggaactatgtataatcactacacaggaaagccaattataacagttcctggacaaaatgtagcagttaaatccggtacggctcaaatcgctgatgagaaaaatggaggatacttggttggttctaccaattatattttctcagttgtgactatgaatcctgctgaaaatcctgattttatcttgtatgtaacggttcaacagcctgagcattattcaggtatccagttgggagaatttgccaccccaatcttggagcgggcttcagctatgaaagaatctctcaatcttcaatctccagccaaaaatttagataaagttacgacagaatcttcttatgcaatgcctagcatcaaggatatttcacctggtgagttggcggaagccttacgccgaaatattgtgcaaccaatcgttgtaggtactggaacaaagattaaagagacttctgtagaagaagggaccaatcttgcaccaaaccaacaagttctccttttatcggataaggtagaagaaattccagacatgtatggctggaaaaaagagactgccgagacctttgctaaatggttggatattgaactggaatttgaaggttcaggttccgttgttcagaag

SEQ ID NO: 1047 - DNA, 1690 bp, Streptococcus pneumoniae
  strain StrR-14
caaaaaagaattggaagctgcagaggtcaaggggattgattttacaaccagtcccaaccgtagttacccaaacggacaatttgcttctagttttatcggactagctcagctccatgaaaatgaagatggcagcaagagcttgctgggaacttctggaatggagagttccttgaacagtattcttgcagggacagacggcattattacctatgaaaaggatcgtctgggtaatattgtacccggaacagaacaagtttcccaacaaacggtagatggcaaggatgtttacacaaccatttccagccccctccagtcctttatggaaacccagatggatgcttttcaagagaaggtaaaaggaaagtacacgacagcgactttggtcagtgctaaaacaggggaaattctggcaacaacgcaacgaccgacctttgatgcagatacaaaagaaggcattacagaggactttgtttggcgtgatatcctttaccaaagtaactatgagccaggttcccctatgaaagtgatgatgttggctgctgctattgataataatacctttccagggggagaagtcttcaatagtagtgagttaaaaattgcagatgtcacgattcgagattgggacgtcaatgaaggattgactggtggcagaatgatgaccttttctcaagggttcgctcactcaagtaacgttgggatgacgcttcttgagcaaaagatgggagatgctacatggcttgattatctaaatcgctttaaatttggtgttccgactcgttttggcttgacggatgaatatgcaggccaacttccagctgacaatatcgtaaatattgctcagagttcatttggacaagggatttcagcgacccagacgcaaatgattcgtgccttcacggctattgccaacgatggagtcatgttagaacctaaatttatcagtgccatttatgatccaaatgatcaaactgctcggaaatcacaaaaagaagttgtgggaaatcctgtgtctaaagatgcagcgagcttgacgcgaacgcatatggttttagtcggtaccgatccagtatatggaactatgtataatcataagacagggaaaccaactgtaactgttcctgggcaaaatgtagccctcaagtctggtacggctcagattgccgatgagaaaaatggaggttacttagttggtacgaccaattacattttttcggctgtatcgatgaaccctgctgaaaatcctgattttattctctatgtgacggttcaacagcctgagcattattcaggtattcagttgggggaatttgccaatcctatcttggaaagggcagtggctatgaaagattcccttaacctccaatctaccgctaaaacgttaaatcaggtaaccaatcaaagcgcttatgccatgcctagcatcaaggacatttcacctggcgatttggcggaagccttacgtcgcaatattgtgcaaccaatcgttgtaggaacaggaacaaaaattaaagaatcatctgtagaagaagggacggatcttgcacctaaccagcaagttcttctcttatctgataaagcagaggaagttccagatatgtatggttggacaaaagagactgctgagacctttgctaagtggctcaatatagaacttgaatttgaaggttcgggctctactgtgcagaag

SEQ ID NO: 1048 - DNA, 1682 bp, Streptococcus pneumoniae
  strain StrR-15
aaaagagttggaaactgcagaggtcaaggggattgattttacaaccagtcccaatcgtagttacccaaacggacaatttgcttctagctttattggcttagcccaacttcatgaaaatgaggatggtagtaagagtttgttagggacttctggtttggagagttctttaaataccattcttgctgggacagacggtattattacctatgaaaaagaccgtgtaggaaatatcgtaccaggtacagaactggtatcgcaacaaactgtggatggcaaggatgtttatacaacattgtctagtccgctacaatctttcatggaaactcagatggatgcctttctagaaaaagtaaaaggtaagtatatgaccgcgaccttggtcagtgcaaagaccggtgaaatcctcgctaccacccaacgacctacctttaatgcagatactaaagaaggaatcactgaggactttgtttggcgtgatattctttatcaaagtaactatgaaccaggatcagccatgaaggttatgacgttagcttcttctattgataataataccttcccaagtggagaatacttcaatagcagtgaattcaaaatagcggatgcgacgactcgagattgggatgttaatgaaggtttgactactggtgggatgatgactttcttacaaggtttcgctcactccagtaatgttggaatgagtctacttgaacaaaaaatgggagatgctacttggttggattatctaaaacgctttaaatttggggttccaactcgctttggcttgacagatgaatacgctggtcaacttccagctgataatattgttagtattgctcaaagctcatttgggcaaggaatttcagtgacacaaacacaaatgcttcgtgcctttacagctattgctaatgatggagttatgctggagccaaaatttataagtgctatttatgatactaacaatcagtctgtacgtaagtcacaaaaagaaatagtaggaaatcctgtttccaaagaggcagcaagcacaactcgaaatcacatgatcttagttgggacggaccctctatatggaactatgtataatcactacacaggaaagccaattataacagttcctggacaaaatgtagcagttaaatccggtacggctcaaatcgctgatgagaaaaatggaggatacttggttggttctaccaattatattttctcagttgtgactatgaatcctgctgaaaatcctgattttatcttgtatgtaacggttcaacagcctgagcattattcaggtatccagttgggagaatttgccaccccaatcttggagcgggcttcagctatgaaagaatctctcaatcttcaatctccagccaaaaatttagataaagttacgacagaatcttcttatgcaatgcctagcatcaaggatatttcacctggtgagttggcggaagccttacgccgaaatattgtgcaaccaatcgttgtaggtactggaacaaagattaaagagacttctgtagaagaagggaccaatcttgcaccaaaccaacaagttctccttttatcggataaggtagaagaaattccagacatgtatggctggaaaaaagagactgctgaaacctttgctaaatggttggatattgagttggaatttgaaggttcaggttccgtcgttc

SEQ ID NO: 1049 - DNA, 1241 bp, Enterococcus faecium
  strain R690
gcagcgttgcgtgataccgttgaaaaaaccattaaaaactgtttggattttgaaaggagacaggagcatgaatagaataaaagttgcaatactgtttgggggttgctcagaggagcatgacgtatcggtaaaatctgcaatagagatagccgctaacattaataaagaaaaatacgagccgttatacattggaattacgaaatctggtgtatggaaaatgtgcgaaaaaccttgcgcggaatgggaaaacgacaattgctattcagctgtactctcgccggataaaaaaatgcacggattacttgttaaaaagaaccatgaatatgaaatcaaccatgttgatgtagcattttcagctttgcatggcaagtcaggtgaagatggatccatacaaggtctgtttgaattgtccggtatcccttttgtaggctgcgatattcaaagctcagcaatttgtatggacaaatcgttgacatacatcgttgcgaaaaatgctgggatagctactcccgccttttgggttattaataaagatgataggccggtggcagctacgtttacctatcctgtttttgttaagccggcgcgttcaggctcatccttcggtgtgaaaaaagtcaatagcgcggacgaattggactacgcaattgaatcggcaagacaatatgacagcaaaatcttaattgagcaggctgtttcgggctgtgaggtcggttgtgcggtattgggaaacagtgccgcgttagctgttggcgaggtggaccaaatcaggctgcagtacggaatctttcgtattcatcaggaagtcgagccggaaaaaggctctgaaaacgcagttataaccgttcccgcagacctttcagcagaggagcgaggacggatacaggaaacggcaaaaaaaatatataaagcgctcggctgtagaggtctagcccgtgtggatatgtttttacaagataacggccgcattgtactgaacgaagtcaatactctgcccggtttcacgtcatacagtcgttatccccgtatgatggccgctgcaggtattgcacttcccgaactgattgaccgcttgatcgtattagcgttaaaggggtgataagcatggaaataggatttacttttttagatgaaatagtacacggtgttcgttgggacgctaaatatgccacttgggataatttcaccggaaaaccggttgacggttatgaagtaaatcgcattgtagggacatacgaatt

SEQ ID NO: 1050 - DNA, 1249 bp, Enterococcus gallinarum
  strain R691
tcacaccgcatacggcctattataccgagcaagcgttgcgtgataccgttgaaaaaaccattaaaaactgtttggattttgaaaggagacaggagcatgaatagaataaaagttgcaatactgtttgggggttgctcagaggagcatgacgtatcggtaaaatctgcaatagagatagccgctaacattaataaagaaaaatacgagccgttatacattggaattacgaaatctggtgtatggaaaatgtgcgaaaaaccttgcgcggaatgggaaaacgacaattgctattcagctgtactctcgccggataaaaaaatgcacggattacttgttaaaaagaaccatgaatatgaaatcaaccatgttgatgtagcattttcagctttgcatggcaagtcaggtgaagatggatccatacaaggtctgtttgaattgtccggtatcccttttgtaggctgcgatattcaaagctcagcaatttgtatggacaaatcgttgacatacatcgttgcgaaaaatgctgggatagctactcccgccttttgggttattaataaagatgataggccggtggcagctacgtttacctatcctgtttttgttaagccggcgcgttcaggctcatccttcggtgtgaaaaaagtcaatagcgcggacgaattggactacgcaattgaatcggcaagacaatatgacagcaaaatcttaattgagcaggctgtttcgggctgtgaggtcggttgtgcggtattgggaaacagtgccgcgttagctgttggcgaggtggaccaaatcaggctgcagtacggaatctttcgtattcatcaggaagtcgagccggaaaaaggctctgaaaacgcagttataaccgttcccgcagacctttcagcagaggagcgaggacggatacaggaaacggcaaaaaaaatatataaagcgctcggctgtagaggtctagcccgtgtggatatgtttttacaagataacggccgcattgtactgaacgaagtcaatactctgcccggtttcacgtcatacagtcgttatccccgtatgatggccgctgcaggtattgcacttcccgaactgattgaccgcttgatcgtattagcgttaaaggggtgataagcatggaaataggatttacttttttagatgaaatagtacacggtgttcgttgggacgctaaatatgccacttgggataatttcaccggaaaaccggttgacggttatgaagtaaatcg

SEQ ID NO: 1051 - DNA, 1272 bp, Enterococcus faecium
  strain R481
tataccgagcaagcgttgcgtgataccgttgaaaaaaccattaaaaactgtttggattttgaaaggagacaggagcatgaatagaataaaagttgcaatactgtttgggggttgctcagaggagcatgacgtatcggtaaaatctgcaatagagatagccgctaacattaataaagaaaaatacgagccgttatacattggaattacgaaatctggtgtatggaaaatgtgcgaaaaaccttgcgcggaatgggaaaacgacaattgctattcagctgtactctcgccggataaaaaaatgcacggattacttgttaaaaagaaccatgaatatgaaatcaaccatgttgatgtagcattttcagctttgcatggcaagtcaggtgaagatggatccatacaaggtctgtttgaattgtccggtatcccttttgtaggctgcgatattcaaagctcagcaatttgtatggacaaatcgttgacatacatcgttgcgaaaaatgctgggatagctactcccgccttttgggttattaataaagatgataggccggtggcagctacgtttacctatcctgtttttgttaagccggcgcgttcaggctcatccttcggtgtgaaaaaagtcaatagcgcggacgaattggactacgcaattgaatcggcaagacaatatgacagcaaaatcttaattgagcaggctgtttcgggctgtgaggtcggttgtgcggtattgggaaacagtgccgcgttagttgttggcgaggtggaccaaatcaggctgcagtacggaatctttcgtattcatcaggaagtcgagccggaaaaaggctctgaaaacgcagttataaccgttcccgcagacctttcagcagaggagcgaggacggatacaggaaacggcaaaaaaaatatataaagcgctcggctgtagaggtctagcccgtgtggatatgtttttacaagataacggccgcattgtactgaacgaagtcaatactctgcccggtttcacgtcatacagtcgttatccccgtatgatggccgctgcaggtattgcacttcccgaactgattgaccgcttgatcgtattagcgttaaaggggtgataagcatggaaataggatttacttttttagatgaaatagtacacggtgttcgttgggacgctaaatatgccacttgggataatttcaccggaaaaccggttgacggttatgaagtaaatcgcattgtagggacatacgaattggcttgaatcgctttttgaagg

SEQ ID NO: 1052 - DNA, 1237 bp, Enterococcus faecium
  strain R492
tcccccggcatacggcctattataccgagcaagcgttgcgtgataccgttgaaaaaaccattaaaaactgtttggattttgaaaggagacaggagcatgaatagaataaaagttgcaatactgtttgggggttgctcagaggagcatgacgtatcggtaaaatctgcaatagagatagccgctaacattaataaagaaaaatacgagccgttatacattggaattacgaaatctggtgtatggaaaatgtgcgaaaaaccttgcgcggaatgggaaaacgacaattgctattcagctgtactctcgccggataaaaaaatgcacggattacttgttaaaaagaaccatgaatatgaaatcaaccatgttgatgtagcattttcagctttgcatggcaagtcaggtgaagatggatccatacaaggtctgtttgaattgtccggtatcccttttgtaggctgcgatattcaaagctcagcaatttgtatggacaaatcgttgacatacatcgttgcgaaaaatgctgggatagctactcccgccttttgggttattaataaagatgataggccggtggcagctacgtttacctatcctgtttttgttaagccggcgcgttcaggctcatccttcggtgtgaaaaaagtcaatagcgcggacgaattggactacgcaattgaatcggcaagacaatatgacagcaaaatcttaattgagcaggctgtttcgggctgtgaggtcggttgtgcggtattgggaaacagtgccgcgttagctgttggcgaggtggaccaaatcaggctgcagtacggaatctttcgtattcatcaggaagtcgagccggaaaaaggctctgaaaacgcagttataaccgttcccgcagacctttcagcagaggagcgaggacggatacaggaaacggcaaaaaaaatatataaagcgctcggctgtagaggtctagcccgtgtggatatgtttttacaagataacggccgcattgtactgaacgaagtcaatactctgcccggtttcacgtcatacagtcgttatccccgtatgatggccgctgcaggtattgcacttcccgaactgattgaccgcttgatcgtattagcgttaaaggggtgataagcatggaaataggatttacttttttagatgaaatagtacacggtgttcgttgggacgctaaatatgccacttgggataatttcaccggaaaaccggttgacggtta

SEQ ID NO: 1053 - DNA, 1263 bp, Enterococcus faecium
  strain R581
catacggcctattataccgagcaagcgttgcgtgataccgttgaaaaaaccattaaaaactgtttggattttgaaaggagacaggagcatgaatagaataaaagttgcaatactgtttgggggttgctcagaggagcatgacgtatcggtaaaatctgcaatagagatagccgctaacattaataaagaaaaatacgagccgttatacattggaattacgaaatctggtgtatggaaaatgtgcgaaaaaccttgcgcggaatgggaaaacgacaattgctattcagctgtactctcgccggataaaaaaatgcacggattacttgttaaaaagaaccatgaatatgaaatcaaccatgttgatgtagcattttcagctttgcatggcaagtcaggtgaagatggatccatacaaggtctgtttgaattgtccggtatcccttttgtaggctgcgatattcaaagctcagcaatttgtatggacaaatcgttgacatacatcgttgcgaaaaatgctgggatagctactcccgccttttgggttattaataaagatgataggccggtggcagctacgtttacctatcctgtttttgttaagccggcgcgttcaggctcatccttcggtgtgaaaaaagtcaatagcgcggacgaattggactacgcaattgaatcggcaagacaatatgacagcaaaatcttaattgagcaggctgtttcgggctgtgaggtcggttgtgcggtattgggaaacagtgccgcgttagctgttggcgaggtggaccaaatcaggctgcagtacggaatctttcgtattcatcaggaagtcgagccggaaaaaggctctgaaaacgcagttataaccgttcccgcagacctttcagcagaggagcgaggacggatacaggaaacggcaaaaaaaatatataaagcgctcggctgtagaggtctagcccgtgtggatatgtttttacaagataacggccgcattgtactgaacgaagtcaatactctgcccggtttcacgtcatacagtcgttatccccgtatgatggccgctgcaggtattgcacttcccgaactgattgaccgcttgatcgtattagcgttaaaggggtgataagcatggaaataggatttacttttttagatgaaatagtacacggtgttcgttgggacgctaaatatgccacttgggataatttcaccggaaaaccggttgacgggtatgaaagtaaatcgcattgtagggacattcgaatt

SEQ ID NO: 1054 - DNA, 1232 bp, Enterococcus faecalis
  strain R610
  misc_feature (1)...(1232): n=a,t,c or g
cggcctattatnccgagcaagcgttgcgtgataccgttgaaaaaaccattaaaaactgtttggattttgaaaggagacaggagcatgaatagaataaaagttgcaatactgtttgggggttgctcagaggagcatgacgtatcggtaaaatctgcaatagagatagccgctaacattaataaagaaaaatacgagccgttatacattggaattacgaaatctggtgtatggaaaatgtgcgaaaaaccttgcgcggaatgggaaaacgacaattgctattcagctgtactctcgccggataaaaaaatgcacggattacttgttaaaaagaaccatgaatatgaaatcaaccatgttgatgtagcattttcagctttgcatggcaagtcaggtgaagatggatccatacaaggtctgtttgaattgtccggtatcccttttgtaggctgcgatattcaaagctcagcaatttgtatggacaaatcgttgacatacatcgttgcgaaaaatgctgggatagctactcccgccttttgggttattaataaagatgataggccggtggcagctacgtttacctatcctgtttttgttaagccggcgcgttcaggctcatccttcggtgtgaaaaaagtcaatagcgcggacgaattggactacgcaattgaatcggcaagacaatatgacagcaaaatcttaattgagcaggctgtttcgggctgtgaggtcggttgtgcggtattgggaaacagtgccgcgttagttgttggcgaggtggaccaaatcaggctgcagtacggaatctttcgtattcatcaggaagtcgagccggaaaaaggctctgaaaacgcagttataaccgttcccgcagacctttcagcagaggagcgaggacggatacaggaaacggcaaaaaaaatatataaagcgctcggctgtagaggtctagcccgtgtggatatgtttttacaagataacggccgcattgtactgaacgaagtcaatactctgcccggtttcacgtcatacagtcgttatccccgtatgatggccgctgcaggtattgcacttcccgaactgattgaccgcttgatcgtattagcgttaaaggggtgataagcatggaaataggatttacttttttagatgaaatagtacacggtgttcgttgggacgctaaatatgccacttgggataatttcaccggaaaaccggttgacggttataagtaa

SEQ ID NO: 1055 - DNA, 1218 bp, Enterococcus gallinarum
  strain R684
taccgagcaagcgttgcgtgataccgttgaaaaaaccattaaaaactgtttggattttgaaaggagacaggagcatgaatagaataaaagttgcaatactgtttgggggttgctcagaggagcatgacgtatcggtaaaatctgcaatagagatagccgctaacattaataaagaaaaatacgagccgttatacattggaattacgaaatctggtgtatggaaaatgtgcgaaaaaccttgcgcggaatgggaaaacgacaattgctattcagctgtactctcgccggataaaaaaatgcacggattacttgttaaaaagaaccatgaatatgaaatcaaccatgttgatgtagcattttcagctttgcatggcaagtcaggtgaagatggatccatacaaggtctgtttgaattgtccggtatcccttttgtaggctgcgatattcaaagctcagcaatttgtatggacaaatcgttgacatacatcgttgcgaaaaatgctgggatagctactcccgccttttgggttattaataaagatgataggccggtggcagctacgtttacctatcctgtttttgttaagccggcgcgttcaggctcatccttcggtgtgaaaaaagtcaatagcgcggacgaattggactacgcaattgaatcggcaagacaatatgacagcaaaatcttaattgagcaggctgtttcgggctgtgaggtcggttgtgcggtattgggaaacagtgccgcgttagctgttggcgaggtggaccaaatcaggctgcagtacggaatctttcgtattcatcaggaagtcgagccggaaaaaggctctgaaaacgcagttataaccgttcccgcagacctttcagcagaggagcgaggacggatacaggaaacggcaaaaaaaatatataaagcgctcggctgtagaggtctagcccgtgtggatatgtttttacaagataacggccgcattgtactgaacgaagtcaatactctgcccggtttcacgtcatacagtcgttatccccgtatgatggccgctgcaggtattgcacttcccgaactgattgaccgcttgatcgtattagcgttaaaggggtgataagcatggaaataggatttacttttttagatgaaatagtacacggtgttcgttgggacgctaaatatgccacttgggataatttcaccggaaaaccggttgacggttagaa

SEQ ID NO: 1056 - DNA, 1265 bp, Enterococcus faecium
  strain R688
aatcacaccgcatacggcctattataccgagcaagcgttgcgtgataccgttgaaaaaaccattaaaaactgtttggattttgaaaggagacaggagcatgaatagaataaaagttgcaatactgtttgggggttgctcagaggagcatgacgtatcggtaaaatctgcaatagagatagccgctaacattaataaagaaaaatacgagccgttatacattggaattacgaaatctggtgtatggaaaatgtgcgaaaaaccttgcgcggaatgggaaaacgacaattgctattcagctgtactctcgccggataaaaaaatgcacggattacttgttaaaaagaaccatgaatatgaaatcaaccatgttgatgtagcattttcagctttgcatggcaagtcaggtgaagatggatccatacaaggtctgtttgaattgtccggtatcccttttgtaggctgcgatattcaaagctcagcaatttgtatggacaaatcgttgacatacatcgttgcgaaaaatgctgggatagctactcccgccttttgggttattaataaagatgataggccggtggcagctacgtttacctatcctgtttttgttaagccggcgcgttcaggctcatccttcggtgtgaaaaaagtcaatagcgcggacgaattggactacgcaattgaatcggcaagacaatatgacagcaaaatcttaattgagcaggctgtttcgggctgtgaggtcggttgtgcggtattgggaaacagtgccgcgttagctgttggcgaggtggaccaaatcaggctgcagtacggaatctttcgtattcatcaggaagtcgagccggaaaaaggctctgaaaacgcagttataaccgttcccgcagacctttcagcagaggagcgaggacggatacaggaaacggcaaaaaaaatatataaagcgctcggctgtagaggtctagcccgtgtggatatgtttttacaagataacggccgcattgtactgaacgaagtcaatactctgcccggtttcacgtcatacagtcgttatccccgtatgatggccgctgcaggtattgcacttcccgaactgattgaccgcttgatcgtattagcgttaaaggggtgataagcatggaaataggatttacttttttagatgaaatagtacacggtgttcgttgggacgctaaatatgccacttgggataatttcaccggaaaaccggttgacggttatgaagtaaatcgcattgtagggacat

SEQ ID NO: 1057 - DNA, 1269 bp, Enterococcus flavescens
  strain R689
tcacaccgcatacggcctattataccgagcaagcgttgcgtgataccgttgaaaaaaccattaaaaactgtttggattttgaaaggagacaggagcatgaatagaataaaagttgcaatactgtttgggggttgctcagaggagcatgacgtatcggtaaaatctgcaatagagatagccgctaacattaataaagaaaaatacgagccgttatacattggaattacgaaatctggtgtatggaaaatgtgcgaaaaaccttgcgcggaatgggaaaacgacaattgctattcagctgtactctcgccggataaaaaaatgcacggattacttgttaaaaagaaccatgaatatgaaatcaaccatgttgatgtagcattttcagctttgcatggcaagtcaggtgaagatggatccatacaaggtctgtttgaattgtccggtatcccttttgtaggctgcgatattcaaagctcagcaatttgtatggacaaatcgttgacatacatcgttgcgaaaaatgctgggatagctactcccgccttttgggttattaataaagatgataggccggtggcagctacgtttacctatcctgtttttgttaagccggcgcgttcaggctcatccttcggtgtgaaaaaagtcaatagcgcggacgaattggactacgcaattgaatcggcaagacaatatgacagcaaaatcttaattgagcaggctgtttcgggctgtgaggtcggttgtgcggtattgggaaacagtgccgcgttagctgttggcgaggtggaccaaatcaggctgcagtacggaatctttcgtattcatcaggaagtcgagccggaaaaaggctctgaaaacgcagttataaccgttcccgcagacctttcagcagaggagcgaggacggatacaggaaacggcaaaaaaaatatataaagcgctcggctgtagaggtctagcccgtgtggatatgtttttacaagataacggccgcattgtactgaacgaagtcaatactctgcccggtttcacgtcatacagtcgttatccccgtatgatggccgctgcaggtattgcacttcccgaactgattgaccgcttgatcgtattagcgttaaaggggtgataagcatggaaataggatttacttttttagatgaaatagtacacggtgttcgttgggacgctaaatatgccacttgggataatttcaccggaaaaccggttgacggttatgaagtaaatcgcattgtagggacatacgaat

SEQ ID NO: 1058 - DNA, 1169 bp, Enterococcus gallinarum
  strain R420
caaattttcttttcttttcctaggtacactgaatgtaaccttaaaagaaaaaaggaaaggaagaaaatgatgaaaaaaattgccgttttatttggagggaattctccagaatactcagtgtcactaacctcagcagcaagtgtgatccaagctattaacccgctgaaatatgaagtaatgaccattggcatcgcaccaacaatggattggtattggtatcaaggaaacctcgcgaatgttcgcaatgatacttggctagaagatcacaaaaactgtcaccagctgactttttctagccaaggatttatattaggagaaaaacgaatcgtccctgatgtcctctttccagtcttgcatgggaagtatggcgaggatggctgtatccaaggactgcttgaactaatgaacctgccttatgttggttgccatgtcgctgcctccgcattatgtatgaacaaatggctcttgcatcaacttgctgataccatgggaatcgctagtgctcccactttgcttttatcccgctatgaaaacgatcctgccacaatcgatcgttttattcaagaccatggattcccgatctttatcaagccgaatgaagccggttcttcaaaagggatcacaaaagtaactgacaaaacagcgctccaatctgcattaacgactgcttttgcttacggttctactgtgttgatccaaaaggcgatagcgggtattgaaattggctgcggcatcttaggaaatgagcaattgacgattggtgcttgtgatgcgatttctcttgtcgacggtttttttgattttgaagagaaataccaattaatcagcgccacgatcactgtcccagcaccattgcctctcgcgcttgaatcacagatcaaggagcaggcacagctgctttatcgaaacttgggattgacgggtctggctcgaatcgattttttcgtcaccaatcaaggagcgatttatttaaacgaaatcaacaccatgccgggatttactgggcactcccgctacccagctatgatggcggaagtcgggttatcctacgaaatattagtagagcaattgattgcactggcagaggaggacaaacgatgaacacattacaattgatcaataaaaaccatccattgaaaaaaaatcaagagcccccgcacttagtgcta

SEQ ID NO: 1059 - DNA, 1166 bp, Enterococcus gallinarum
  strain R631
caaattttcttttcttttcctaggtacactgaatgtaaccttaaaagaaaaaaggaaaggaagaaaatgatgaaaaaaattgccgttttatttggagggaattctccagaatactcagtgtcactagcctcagcagcaagtgtgatccaagctattgacccgctgaaatatgaagtaatgaccattggcatcgcaccaacaatggattggtattggtatcaaggaaacctcgcgaatgttcgcaatgatacttggctagaagatcacaaaaactgtcaccagctgactttttctagccaaggatttatattaggagaaaaacgaatcgtccctgatgtcctctttccagtcttgcatgggaagtatggcgaggatggctgtatccaaggactgcttgaactaatgaacctgccttatgttggttgccatgtcgctgcctccgcattatgtatgaacaaatggctcttgcatcaacttgctgataccatgggaatcgctagtgctcccactttgcttttatcccgctatgaaaacgatcctgccacaatcgatcgttttattcaagaccatggattcccgatctttatcaagccgaatgaagccggttcttcaaaagggatcacaaaagtaactgacaaaacagcgctccaatctgcattaacgactgcttttgcttacggttctactgtgttgatccaaaaggcgatagcgggtattgaaattggctgcggcatcttaggaaatgagcaattgacgattggtgcttgtgatgcgatttctcttgtcgacggtttttttgattttgaagagaaataccaattaatcagcgccacgatcactgtcccagcaccattgcctctcgcgcttgaatcacagatcaaggagcaggcacagctgctttatcgaaacttgggattgacgggtctggctcgaatcgattttttcgtcaccaatcaaggagcgatttatttaaacgaaatcaacaccatgccgggatttactgggcactcccgctacccagctatgatggcggaagtcgggttatcctacgaaatattagtagagcaattgattgcactggcagaggaggacaaacgatgaacacattacaattgatcaataaaaaccatccattgaaaaaaaatcaagagcccccgcacttagtg

SEQ ID NO: 1060 - DNA, 1028 bp, Enterococcus casseliflavus
  ref <308>: DATABASE ACCESSION NUMBER: ATCC 25788
aacatgaaaaaaatcgccttatttttggaggcaattcaccggaatacaccgtttctttagcttcagcaactagcgcaatcgaagcactccaatcatctccctatgactacgacctctctttgatcgggatcgccccagatgctatggattggtacttgtatacaggagaactggaaaacatccgacaagacacgtggttgttggatacgaaacataaacagaaaatacagccgctattcgaaggaaacggcttttggctaagtgaagagcagcaaacgttggtacctgatgttttatttcccattatgcatggcaaatacggggaagatggcagtatccaaggattgtttgaattgatgaagctgccttatgtaggctgcggggtggcaggttctgccttatgtatgaacaaatggctgctgcatcaagctgcagcagccattggcgtacaaagtgctcctacgattctcttgacaaatcaagccaaccagcaagaacaaatcgaagcttttatccagacccatggcttcccagttttctttaagcctaatgaagcgggctcctcaaaagggatcactaaagtcacctgcgttgaagaaatcgcttctgccttaaaagaagcctttacttattgttccgcagtgctcctacaaaaaaatattgccggtgttgagatcggttgcggtattttgggcaacgactctttgactgtcggtgcttgtgacgccatttcattagtagacggctttttcgattttgaagaaaagtaccagctgatcagcgccaaaatcaccgtccctgcgccattgcctgaaacgattgaaaccaaggtcaaagaacaagctcagctgctctatcgtagtcttggtcttaaaggtcttgctcgcatcgacttttttgtcacggagcgaggagaactatacttgaatgaaatcaatactatgccgggctttacgagtcactcccgctatcctgccatgatggcagcggtcggcttatcctatcaagaactactacaaaaactgctt

SEQ ID NO: 1061 - DNA, 1030 bp, Enterococcus casseliflavus
  strain R689
aatatgaaaaaaatcgccttatttttggaggcaattcaccggagtacgccgtttctttagcctcagcaactagcgcaatcgaagcactccaatcatctcccgatgactatgacctctctttgatcgggatcgccccagatgctatggattggtatttgtatacaggagaactggaaaacatccgacaagacacgtggttgttggatacgaaacataaacagaaaatccagccgctttttgaaggaaacggcttttggctaagtgaagagcaacaaacgttggttcctgatgttttatttcccattatgcatggcaaatacggggaagatggcagtatccaaggattgtttgaattgatgaaactaccttatgtaggctgcggggtggcagcctctgccttatgtatgaacaaatggctgctgcatcaagcagcagaagcgattggcgtacaaagtgctcctacgattctcttgacaaatcaagccaaccagcaagatcaaatcgaagcttttatccagacccatggctttccggttttttttaagcctaatgaagcgggctcctcaaaagggatcactaaagtcacctgcgttgaagaaatcgcttctgccttaaaagaagcctttacttattgttcagcagtgctcctacaaaaaaatattgccggtgttgagatcggttgcggtattttgggcaacgactctttgactgtcggtgcttgtgacgctatttcattagtagacggctttttcgattttgaagaaaagtaccagctgatcagcgccaagatcaccgttcctgcaccattgcctgaaacgattgaaaccaaggtcaaagaacaagctcagctgctctatcgtagtctttgtcttaaaggtcttgctcgcatcgacttttttgtcacggatcaaggagaactatacttgaatgaaatcaatactatgccgggctttacgagtcactcccgctatcctgccatgatggcagcgatcggcttatcctatcaagaactactacaaaaactgcttgt

SEQ ID NO: 1062 - DNA, 1031 bp, Enterococcus casseliflavus
  strain R754
aaacatgaaaaaaatcgccattatttttggaggcaattcaccggaatacaccgtttctttagcttcagcaactagcgcaatcgaagcactccaatcatctccctatgactacgacctctctttgatcgggatcgccccagatgctatggattggtacttgtatacaggagaactggaaaacatccgacaagacacgtggttgttggatacgaaacataaacagaaaatacagccgctattcgaaggaaacggcttttggctaagtgaagagcagcaaacgttggtacctgatgttttatttcccattatgcatggcaaatacggggaagatggcagtatccaaggattgtttgaattgatgaagctgccttatgtaggctgcggggtggcaggttctgccttatgtatgaacaaatggctgctgcatcaagctgcagcagccattggcgtacaaagtgctcctacgattctcttgacaaatcaagccaaccagcaagaacaaatcgaagcttttatccagacccatggcttcccagttttctttaagcctaatgaagcgggctcctcaaaagggatcactaaagtcacctgcgttgaagaaatcgcttctgccttaaaagaagcctttacttattgttccgcagtgctcctacaaaaaaatattgccggtgttgagatcggttgcggtattttgggcaacgactctttgactgtcggtgcttgtgacgccatttcattagtagacggctttttcgattttgaagaaaagtaccagctgatcagcgccaaaatcaccgtccctgcgccattgcctgaaacgattgaaaccaaggtcaaagaacaagctcagctgctctatcgtagtcttggtcttaaaggtcttgctcgcatcgacttttttgtcacggagcgaggagaactatacttgaatgaaatcaatactatgccgggctttacgagtcactcccgctatcctgccatgatggcagcggtcggcttatcctatcaagaactactacaaaaactgcttg

SEQ ID NO: 1063 - DNA, 1030 bp, Enterococcus casseliflavus
  strain R775
aacatgaaaaaaatcgccattatttttggaggcaattcaccggaatacaccgtttctttagcttcagcaactagcgcaatcgaagcactccaatcatctccctatgactacgacctctctttgatcgggatcgccccagatgctatggattggtacttgtatacaggagaactggaaaacatccgacaagacacgtggttgttggatacgaaacataaacagaaaatacagccgctatttgaaggaaacggcttttggctaagtgaagagcagcaaacgttagtacctgatattttatttcccattatgcatggcaaatacggggaagatggcagtatccaaggattgtttgaattgatgaaactaccttatgtaggttgcggggtggcaggttctgccttatgtatgaacaaatggctgctgcatcaagctgcagcagccattggcgtacaaagtgctcctacgattctcttgacaaatcaagccaaccagcaagaacaaatcgaagcttttatccagacccatggcttcccagttttctttaagcctaatgaagcgggctcttcaaaagggatcactaaagtcacctgcgttgaagaaatcgcttctgccttaaaaaaagcctttacttattgttccgcagtgctcctacaaaaaaatattgccggtgttgagatcggttgcggtattttgggcaacgactctttgactgtcggtgcttgtgacgccatttcattagtagacggctttttcgattttgaagaaaagtaccagctgatcagcgccaaaatcaccgtccctgcgccattgcctgaaacgattgaaaccaaggtcaaagaacaagctcagctgctctatcgtagtcttggtcttaaaggtcttgctcgcatcgacttttttgtcacggatcaaggagaactatacttgaatgaaatcaatactatgccgggctttacgagtcactcccgttatcctgccatgatggcagcggtcggcttatcctatcaagaactactacaaaaactgcttg

SEQ ID NO: 1064 - DNA, 1032 bp, Enterococcus flavescens
  ref <308>: DATABASE ACCESSION NUMBER: ATCC 49996
aaacatgaaaaaaatcgccattatttttggaggcaattcaccggaatacaccgtttctttagcttcagcaactagcgcaatcgaagcactccaatcatctccctatgactacgacctctctttgatcgggatcgccccagatgctatggattggtacttgtatacaggagaactggaaaacatccgacaagacacgtggttgttggatacgaaacagaaacagaaaatacagccgctattcgaaggaaacggcttttggttaagtgaagagcagcaaacgttggtacctgatgttttatttcccattatgcatggcaaatacggggaagatggcagtatccaaggattgtttgaattgatgaagctaccttatgtaggctgcggggtggcaggttctgccttatgtatgaacaaatggttgctgcatcaagctgcagcagccattggcgtacaaagtgctcctacgattctcttgacaaatcacgccaaccagcaagaacaaatcgaagcttttatccagacccatggctttccagttttctttaagcctaatgaagcgggttcctcaaaagggatcactaaagtcacctgcgttgaagaaatcgcttctgccttaaaagaagcctttacttattgttccgcagtgctcctacaaaaaaatattgccggtgttgagatcggttgcggtattttgggcaacgactctttgactgtcggtgcttgtgacgccatttcattagtagacggctttttcgattttgaagaaaagtaccagctgatcagcgccaaaatcaccgtccctgcgccattgcctgaaacgattgaaactaaggtcaaagaacaagctcagctgctctatcgtagtcttggacttaaaggtcttgctcgcatcgacttttttgtcacggatcaaggagaactatacttgaatgaaatcaatactatgccgggctttacgagtcactcccgctatcctgccatgatggcagcggtcgggttatcctatcaagaactactacaaaaactacttgt

SEQ ID NO: 1065 - DNA, 1034 bp, Enterococcus flavescens
  strain R758
aaaaacatgaaaaaaatcgccattatttttggaggcaattcaccggaatacaccgtttctttagcttcagcaactagcgcaatcgaagcactccaatcatctccctatgactacgacctctctttgatcgggatcgccccagatgctatggattggtacttgtatacaggagaactggaaaacatccgacaagacacgtggttgttggatacgaaacataaacagaaaatacagccgctattcgaaggaaacggcttttggctaagtgaagagcagcaaacgttggtacctgatgttttatttcccattatgcatggcaaatacggggaagatggcagtatccaaggattgtttgaattgatgaagctgccttatgtaggctgcggggtggcaagttctgccttatgtatgaacaaatggctgctgcatcaagctgcagcagccattggcgtacaaagtgctcctacgattctcttgacaaatcaagccaaccagcaagaacaaatcgaagcttttatccagacccatggctttccagttttctttaagcctaatgaagcgggctcctcaaaagggatcactaaagtcacctgcgttgaagaaatcgcttctgccttaaaagaagcctttacttattgttccgcagtgctcctacaaaaaaatattgccggtgttgagatcggttgcggtattttgggcaacgactctttgactgtcggtgcttgtgacgccatttcattagtagacggctttttcgattttgaagaaaagtaccagctgatcagcgccaaaatcaccgtccctgcgccattgcctgaaacgattgaaaccaaggtcaaagaacaagctcagctgctctatcgtagtcttggtcttaaaggtcttgctcgcatcgacttttttgtcacggatcaaggagaactatacttgaatgaaatcaatactatgccgggctttacgagtcactcccgctatcctgccatgatggcagcggtcggcttatcctatcaagaactactacaaaaactgcttgt

SEQ ID NO: 1066 - DNA, 1012 bp, Enterococcus flavescens
  strain R760
catgaaaaaaatcgccattatttttggaggcaattcaccggaatacaccgtttctttagcctcagcaactagcgcaatcgaagcactccaatcatctccctatgattacgacctctctttgatcgggatcgccccagatgctatggattggtacttgtatacaggagaactggaaaacatccgacaagacacgtggttgttggatacgaaacatacacagaaaatccagccactttttgaaggaaacggcttttggataagtgaagcgcagcaaacgttggtacctgatgttttatttcccattatgcatggtaaatacggggaagatggcagtatccaaggattgtttgaattgatgaagctgccttatgtaggctgtggggtggcagcctctgccttatgtatgaacaaatggttattgcatcaagcagcagcagcgattggcgtacaaagcgctcctacgattctcttgacaaatcaagccaaccagcaaagacaaatcgaagcctttatccagacccatggctttccagttttctttaagcctaatgaagcgggctcctcaaaagggatcacaaaagtaacttgtgttgaagaaatcgctcctgccttgaaggaagccttcgcttattgttccgcagtgctcttacaaaaaaatatcgctggcgttgagattggttgcggtatcttaggcaacgactctttgactgtcggtgcttgtgacgctatttcattagtagacggctttttcgattttgaagaaaagtaccagttgatcagcgccaaaatcaccgttcctgcgccattgcctgaaacgattgaaaccaaagtcaaagaacaagctcagctgctctatcacagtcttggtcttaaaggacttgctcgcatcgacttttttgtcacggatcaaggagaactatacttgaatgaaatcaatactatgccgggctttacgagtcactcccgctatcctgccatgatggcagcggtcggcttatcctatcaagaatta

SEQ ID NO: 1067 - DNA, 721 bp, Enterococcus faecium
  strain R481
  misc_feature (1)...(721): n=a,t,c or g
cttacgctttatcgattagacacgggnagcttgtccaatgggragccgatttgattttatggatgaacgctctcatcatgcggcaaatggaatatcatgcaatgaagcgcaaaatcgcagacgtttgcgctccatcatggaaaacagtgggtttgaagcatatagcctcgaatggtggcactatgtattaagagacgaaccataccccaatagctattttgatttccccgttaaataaacttttaaccgttgcacggacaaactatataagctaactctttcggcaggaaacccgacgtatgtaactggttcttagggaatttatatatagtagatagtattgaagatgtaaggcagagcgatattgcggtcattatctgcgtgcgctgcggcaagatagcctgataataagactgatcgcatagaggggtggtatttcacaccgcccattgtcaacaggcagttcagcctcgttaaattcagcatgggtatcacttatgaaaattcatctacattggtgataatagtaaatccagtagggcgaaataattgactgtaatttacggggcaaaacggcacaatctcaaacgagattgtgccgtttaaggggaagattctagaaatatttcatacttccaactatatagttaaggaggagactgaaaatgaagaagttgttttttttattgttattgttattcttaatatacttaggttattg

SEQ ID NO: 1068 - DNA, 668 bp, Enterococcus faecium
  strain R492
atttttaaggatgaacgctcttcatcatgcggcaaatggaatatcatgcaatgaagcgcaaaatcgcagacgtttgcgctccatcatggaaaacagtgggtttgaagcatatagcctcgaatggtggcactatgtattaagagacgaaccataccccaatagctattttgatttccccgttaaataaacttttaaccgttgcacggacaaactatataagctaactctttcggcaggaaacccgacgtatgtaactggttcttagggaatttatatatagtagatagtattgaagatgtaaggcagagcgatattgcggtcattatctgcgtgcgctgcggcaagatagcctgataataagactgatcgcatagaggggtggtatttcacaccgcccattgtcaacaggcagttcagcctcgttaaattcagcatgggtatcacttatgaaaattcatctacattggtgataatagtaaatccagtagggcgaaataattgactgtaatttacggggcaaaacggcacaatctcaaacgagattgtgccgtttaaggggaagattctagaaatatttcatacttccaactatatagttaaggaggagactgaaaatgaagaagttgttttttttattgttattgttattcttaatatacttaggttat

SEQ ID NO: 1069 - DNA, 760 bp, Enterococcus faecium
  strain R581
  misc_feature (1)...(760): n=a,t,c or g
cggcaagtgccattgatcttacgctttatcgattagacacgggtragcttgtaccaatgggaagccgatttgattttatggatgaacgctctcatcatgcggcaaatggaatatcatgcaatgaagcgcaaaatcgcagacgtttgcgctccatcatggaaaacagtgggtttgaagcatatagcctcgaatggtggcactatgtattaagagacgaaccataccccaatagctattttgatttccccgttaaataaacttttaaccgttgcacggacaaactatataagctaactctttcggcaggaaacccgacgtatgtaactggttcttagggaatttatatatagtagatagtattgaagatgtaaggcagagcgatattgcggtcattatctgcgtgcgctgcggcaagatagcctgataataagactgatcgcatagaggggtggtatttcacaccgcccattgtcaacaggcagttcagcctcgttaaattcagcatgggtatcacttatgaaaattcatctacattggtgataatagtaaatccagtagggcgaaataattgactgtaatttacggggcaaaacggcacaatctcaaacgagattgtgccgtttaaggggaagattctagaaatatttcatacttccaactatatagttaaggaggagactgaaaatgaagaagttgttttttttattgttattgttattcttaatatacttaggttatgactacgttaatgaaancctga

SEQ ID NO: 1070 - DNA, 801 bp, Enterococcus faecalis
  strain R610
  misc_feature (1)...(801): n=a,t,c or g
aaaaggaatacggggctttcaaaaatccaagccataacccgcgggcaagtgccatttgattcttacgctttaatcgattagacacgggtaagcttgtaccaatggggaaccgatttgattttaatgnatgaacgctcttcatcatgcggcaaatggaatatcatgcaatgaagcgcaaaatcgcagacgtttgcgctccatcatggaaaacagtgggtttgaagcatatagcctcgaatggtggcactatgtattaagagacgaaccataccccaatagctattttgatttccccgttaaataaacttttaaccgttgcacggacaaactatataagctaactctttcggcaggaaacccgacgtatgtaactggttcttagggaatttatatatagtagatagtattgaagatgtaaggcagagcgatattgcggtcattatctgcgtgcgctgcggcaagatagcctgataataagactgatcgcatagaggggtggtatttcacaccgcccattgtcaacaggcagttcagcctcgttaaattcagcatgggtatcacttatgaaaattcatctacattggtgataatagtaaatccagtagggcgaaataattgactgtaatttacggggcaaaacggcacaatctcaaacgagattgtgccgtttaaggggaagattctagaaatatttcatacttccaactatatagttaaggaggagactgaaaatgaagaagttgtttttttttattgttattgttattcttaatatacttaggttatgactacgttaatgaa

SEQ ID NO: 1071 - DNA, 711 bp, Enterococcus gallinarum
  strain R684
ttgtaccaatggggagccgatttgattttatggatgaacgctctcatcatgcggcaaatggaatatcatgcaatgaagcgcaaaatcgcagacgtttgcgctccatcatggaaaacagtgggtttgaagcatatagcctcgaatggtggcactatgtattaagagacgaaccataccccaatagctattttgatttccccgttaaataaacttttaaccgttgcacggacaaactatataagctaactctttcggcaggaaacccgacgtatgtaactggttcttagggaatttatatatagtagatagtattgaagatgtaaggcagagcgatattgcggtcattatctgcgtgcgctgcggcaagatagcctgataataagactgatcgcatagaggggtggtatttcacaccgcccattgtcaacaggcagttcagcctcgttaaattcagcatgggtatcacttatgaaaattcatctacattggtgataatagtaaatccagtagggcgaaataattgactgtaatttacggggcaaaacggcacaatctcaaacgagattgtgccgtttaaggggaagattctagaaatatttcatacttccaactatatagttaaggaggagactgaaaatgaagaagttgttttttttattgttattgttattcttaatatacttaggttatgactacgttaatgaagcactg

SEQ ID NO: 1072 - DNA, 751 bp, Enterococcus faecium
  strain R688
  misc_feature (1)...(751): n=a,t,c or g
gccattgatcttacgctttatcgattagacacgggtnagcttgtaccaatggggagccgatttgattttatggatgaacgctctcatcatgcggcaaatggaatatcatgcaatgaagcgcaaaatcgcagacgtttgcgctccatcatggaaaacagtgggtttgaagcatatagcctcgaatggtggcactatgtattaagagacgaaccataccccaatagctattttgatttccccgttaaataaacttttaaccgttgcacggacaaactatataagctaactctttcggcaggaaacccgacgtatgtaactggttcttagggaatttatatatagtagatagtattgaagatgtaaggcagagcgatattgcggtcattatctgcgtgcgctgcggcaagatagcctgataataagactgatcgcatagaggggtggtatttcacaccgcccattgtcaacaggcagttcagcctcgttaaattcagcatgggtatcacttatgaaaattcatctacattggtgataatagtaaatccagtagggcgaaataattgactgtaatttacggggcaaaacggcacaatctcaaacgagattgtgccgtttaaggggaagattctagaaatatttcatacttccaactatatagttaaggaggagactgaaaatgaagaagttgttttttttattgttattgttattcttaatatacttaggttatgactacgttaatgaagcactg

SEQ ID NO: 1073 - DNA, 685 bp, Enterococcus flavescens
  strain R689
atttgattttatggatgaacgctctcatcatgcggcaaatggaatatcatgcaatgaagcgcaaaatcgcagacgtttgcgctccatcatggaaaacagtgggtttgaagcatatagcctcgaatggtggcactatgtattaagagacgaaccataccccaatagctattttgatttccccgttaaataaacttttaaccgttgcacggacaaactatataagctaactctttcggcaggaaacccgacgtatgtaactggttcttagggaatttatatatagtagatagtattgaagatgtaaggcagagcgatattgcggtcattatctgcgtgcgctgcggcaagatagcctgataataagactgatcgcatagaggggtggtatttcacaccgcccattgtcaacaggcagttcagcctcgttaaattcagcatgggtatcacttatgaaaattcatctacattggtgataatagtaaatccagtagggcgaaataattgactgtaatttacggggcaaaacggcacaatctcaaacgagattgtgccgtttaaggggaagattctagaaatatttcatacttccaactatatagttaaggaggagactgaaaatgaagaagttgttttttttattgttattgttattcttaatatacttaggttatgactacgttaatga

SEQ ID NO: 1074 - DNA, 732 bp, Enterococcus faecium
  strain R690
atcgattagacacgggtgagcttgtaccaatggggagccgatttgattttatggatgaacgctctcatcatgcggcaaatggaatatcatgcaatgaagcgcaaaatcgcagacgtttgcgctccatcatggaaaacagtgggtttgaagcatatagcctcgaatggtggcactatgtattaagagacgaaccataccccaatagctattttgatttccccgttaaataaacttttaaccgttgcacggacaaactatataagctaactctttcggcaggaaacccgacgtatgtaactggttcttagggaatttatatatagtagatagtattgaagatgtaaggcagagcgatattgcggtcattatctgcgtgcgctgcggcaagatagcctgataataagactgatcgcatagaggggtggtatttcacaccgcccattgtcaacaggcagttcagcctcgttaaattcagcatgggtatcacttatgaaaattcatctacattggtgataatagtaaatccagtagggcgaaataattgactgtaatttacggggcaaaacggcacaatctcaaacgagattgtgccgtttaaggggaagattctagaaatatttcatacttccaactatatagttaaggaggagactgaaaatgaagaagttgttttttttattgttattgttattcttaatatacttaggttatgactacgttaatgaagcactg

SEQ ID NO: 1075 - DNA, 670 bp, Enterococcus gallinarum
  strain R691
tctcatcatgcggcaaatggaatatcatgcaatgaagcgcaaaatcgcagacgtttgcgctccatcatggaaaacagtgggtttgaagcatatagcctcgaatggtggcactatgtattaagagacgaaccataccccaatagctattttgatttccccgttaaataaacttttaaccgttgcacggacaaactatataagctaactctttcggcaggaaacccgacgtatgtaactggttcttagggaatttatatatagtagatagtattgaagatgtaaggcagagcgatattgcggtcattatctgcgtgcgctgcggcaagatagcctgataataagactgatcgcatagaggggtggtatttcacaccgcccattgtcaacaggcagttcagcctcgttaaattcagcatgggtatcacttatgaaaattcatctacattggtgataatagtaaatccagtagggcgaaataattgactgtaatttacggggcaaaacggcacaatctcaaacgagattgtgccgtttaaggggaagattctagaaatatttcatacttccaactatatagttaaggaggagactgaaaatgaagaagttgttttttttattgttattgttattcttaatatacttaggttatgactacgttaatgaagcactg

SEQ ID NO: 1076 - DNA, 948 bp, Escherichia coli
  strain DG131/3
atgaaaataataatttttagagtgctaacttttttctttgttatcttttctgttaatgtggttgcgaaggaatttaccttagatttctcgacagcaaagacgtatgtagattcgctgaatgtcattcgctctgcaataggtactccattacagactatttcatcaggaggtacgtctttactgatgattgatagtggcacaggggataatttgtttgcagttgatgtcagagggatagatccagaggaagggcggtttaataatctacggcttattgttgaacgaaataatttatatgtgacaggatttgttaacaggacaaataatgttttttatcgctttgctgatttttcacatgttacctttcctggtacaactgcggttacattgtctggtgacagtagctataccacgttacagcgtgttgcggggatcagtcgtacggggatgcagataaatcgccattcgttgactacttcttatctggatttaatgtcgcatagcggaacctcactgacgcagtctgtggcaagagcgatgttacggtttgttactgtgacagctgaagctttacgttttcggcaaattcagaggggatttcgtacaacacttgatgatctcagtgggcgttcttatgtaatgactgctgaagatgttgatcttacgttgaactggggaaggttgagtagtgtcctgcctgactatcatggacaagactctgttcgtgttggaagaatttcttttggaagtgttaatgcaattctgggtagcgtggcattaatactgaattgtcatcatcatgcatcgcgagttgccagaattgtacctaatgagtttccttctatgtgcccggtagatggaagagtgcgtgggattacgcacaataaaatattgtgggactcatccactctgggggcaattttgatacgcagggctattagcagttga

SEQ ID NO: 1077 - DNA, 1259 bp, Escherichia coli
  strain 94C
cacctgtatatgaagtgtatattatttaaatgggtactgtgcctgttactgggtttttcttcggtatcctattcccgggagtttacgatagacttttcgacccaacaaagttatgtctcttcgttaaatagtatacggacagagatatcgacccctcttgaacatatatctcaggggaccacatcggtgtctgttattaaccacaccccaccgggcagttattttgctgtggatatacgagggcttgatgtctatcaggcgcgttttgaccatcttcggctgattattgagcaaaataatttatatgtggccgggttcgttaatacggcaacaaatactttctaccgtttttcagattttacacatatatcagtgcccgatgtgacaacggtttccatgacaacggacagcagttataccactctgcaacgtgtcgcagcgctggaacgttccggaatgcaaatcagtcgtcactcactggtttcatcatatctggcgttaatggagttcagtggtaatacaatgaccagagatgcatccagagcagttctgcgttttgtcactgtcacagcagaagccttacgcttcaggcagatacagagagaatttcgtcaggcactgtctgaaactgctcctgtgtataccatgacgccgggagacgtggacctcactctgaactgggggcgaatcagcaatgtgcttccggagtatcggggagaggatggtgtcagagtggggagaatatcctttaataatatatcagcgatactgggtactgtggccgttatactgaattgccatcatcagggggcgcgttctgttcgcgccgtgaatgaagagagtcaaccagaatgtcagataactggcgacaggcccgttataaaaataaacaatacattatgggaaagtaatacagctgcagcgtttctgaacagaaagtcacagtttttatatacaacgggtaaataaaggagttaagtatgaagaagatgtttatggcggttttatttgcattagtttctgttaatgcaatggcggcggattgtgctaaaggtaaaattgagttttccaagtataatgaggatgacacatttacagtgaaggttgacgggaaagaatactggaccagtcgctggaatctgcaaccgttactgcaaagtgctcagctgacaggaatgactgtcacaatcaaatccagtacctgtgaatcaggctccggatttgctgaagtgcagtttaataatgactgaggcataacc

SEQ ID NO: 1078 - DNA, 22 bp, Artificial Sequence
  Synthetic DNA Sequence
agttctgcgttttgtcactgtc

SEQ ID NO: 1079 - DNA, 19 bp, Artificial Sequence
  Synthetic DNA Sequence
cggaagcacattgctgatt

SEQ ID NO: 1080 - DNA, 25 bp, Artificial Sequence
  Synthetic DNA Sequence
tatagctactgtcaccagacaatgt

SEQ ID NO: 1081 - DNA, 20 bp, Artificial Sequence
  Synthetic DNA Sequence
atgtcagagggatagatcca

SEQ ID NO: 1082 - DNA, 23 bp, Artificial Sequence
  Synthetic DNA Sequence
ttgarcraaataatttatatgtg

SEQ ID NO: 1083 - DNA, 20 bp, Artificial Sequence
  Synthetic DNA Sequence
tgatgatgrcaattcagtat

SEQ ID NO: 1084 - DNA, 39 bp, Artificial Sequence
  Synthetic DNA Sequence
ccacgccgctttgctgatttttcacatgttaccgcgtgg

SEQ ID NO: 1085 - DNA, 34 bp, Artificial Sequence
  Synthetic DNA Sequence
ccacgccactgtctgaaactgctcctgtgcgtgg

SEQ ID NO: 1086 - DNA, 20 bp, Artificial Sequence
  Synthetic DNA Sequence
ctactcccgccttttgggtt

SEQ ID NO: 1087 - DNA, 20 bp, Artificial Sequence
  Synthetic DNA Sequence
ctcacagcccgaaacagcct

SEQ ID NO: 1088 - DNA, 20 bp, Artificial Sequence
  Synthetic DNA Sequence
tgccgtttcctgtatccgtc

SEQ ID NO: 1089 - DNA, 20 bp, Artificial Sequence
  Synthetic DNA Sequence
atccacacgggctagacctc

SEQ ID NO: 1090 - DNA, 21 bp, Artificial Sequence
  Synthetic DNA Sequence
aatagcgcggacgaattggac

SEQ ID NO: 1091 - DNA, 20 bp, Artificial Sequence
  Synthetic DNA Sequence
aacgcggcactgtttcccaa

SEQ ID NO: 1092 - DNA, 21 bp, Artificial Sequence
  Synthetic DNA Sequence
tcggcaagacaatatgacagc

SEQ ID NO: 1093 - DNA, 381 bp, Staphylococcus saprophyticus
  strain CSsa-165
taacgggcgtctcgatagaaaaacacgtgaaaatcccaatgattataaacaatcaatatacgattttgctgaagctgtaacaaaaggtattaaggaacaaacaaataaaaattaataggcaacttaaccagaatcgttaaaactatatgacgattctggttttttaaattcaaaaagttttctaaaaaatttacctgcttttttaaagtataggtataaaatacaattgattaaaatagtaaaggaaatgaatcatgaaacaattaactaagcctttatacttttacctattactttttattacaacaacactgattggcgcgttactattatatttgccaatcacaggtaaacatcctattgattttgtggacgcccgtt

SEQ ID NO: 1094 - DNA, 23 bp, Artificial Sequence
  Synthetic DNA Sequence
ggtaaaacaggtacttctaacta

SEQ ID NO: 1095 - DNA, 20 bp, Artificial Sequence
  Synthetic DNA Sequence
cgatagaagcagcaggacaa

SEQ ID NO: 1096 - DNA, 20 bp, Artificial Sequence
  Synthetic DNA Sequence
ctgatggatgcggaagatac

SEQ ID NO: 1097 - DNA, 26 bp, Artificial Sequence
  Synthetic DNA Sequence
tcytcaaaagggatcacwaaagtmac

SEQ ID NO: 1098 - DNA, 23 bp, Artificial Sequence
  Synthetic DNA Sequence
tcttcaaaatcgaaaaagccgtc

SEQ ID NO: 1099 - DNA, 23 bp, Artificial Sequence
  Synthetic DNA Sequence
tcaaaagggatcacwaaagtmac

SEQ ID NO: 1100 - DNA, 26 bp, Artificial Sequence
  Synthetic DNA Sequence
gtaaakcccggcatrgtrttgatttc

SEQ ID NO: 1101 - DNA, 23 bp, Artificial Sequence
  Synthetic DNA Sequence
gacggytttttygattttgaaga

SEQ ID NO: 1102 - DNA, 23 bp, Artificial Sequence
  Synthetic DNA Sequence
aaaaartcgatkcgagcmagacc

SEQ ID NO: 1103 - DNA, 20 bp, Artificial Sequence
  Synthetic DNA Sequence
atcccgctatgaaaacgatc

SEQ ID NO: 1104 - DNA, 20 bp, Artificial Sequence
  Synthetic DNA Sequence
ggatcaacacagtagaaccg

SEQ ID NO: 1105 - DNA, 25 bp, Artificial Sequence
  Synthetic DNA Sequence
ctcctacgattctcttgayaaatca

SEQ ID NO: 1106 - DNA, 23 bp, Artificial Sequence
  Synthetic DNA Sequence
caaccgatctcaacaccggcaat

SEQ ID NO: 1107 - DNA, 23 bp, Artificial Sequence
  Synthetic DNA Sequence
ctcatttgacttcctcctttgct

SEQ ID NO: 1108 - DNA, 23 bp, Artificial Sequence
  Synthetic DNA Sequence
gtaagaatcggaaaagcggaagg

SEQ ID NO: 1109 - DNA, 23 bp, Artificial Sequence
  Synthetic DNA Sequence
acatcgtgatcgctaaaaggagc

SEQ ID NO: 1110 - DNA, 23 bp, Artificial Sequence
  Synthetic DNA Sequence
acgagaaagacaacaggaagacc

SEQ ID NO: 1111 - DNA, 25 bp, Artificial Sequence
  Synthetic DNA Sequence
ctttttccggctcgwyttcctgatg

SEQ ID NO: 1112 - DNA, 20 bp, Artificial Sequence
  Synthetic DNA Sequence
ggctgygatattcaaagctc

SEQ ID NO: 1113 - DNA, 20 bp, Artificial Sequence
  Synthetic DNA Sequence
accgacctcacagcccgaaa

SEQ ID NO: 1114 - DNA, 21 bp, Artificial Sequence
  Synthetic DNA Sequence
tcwgagcctttttccggctcg

SEQ ID NO: 1115 - DNA, 26 bp, Artificial Sequence
  Synthetic DNA Sequence
tttcgggctgtgaggtcggbtghgcg

SEQ ID NO: 1116 - DNA, 27 bp, Artificial Sequence
  Synthetic DNA Sequence
tttcgggctgtgaggtcggbtghgcgg

SEQ ID NO: 1117 - DNA, 801 bp, Enterococcus faecium
  strain U94526
aaattcgatccgcactacatcggaattacaaaaaacggtgtatggaagctatgcaagaagccatgtacggaatgggaagccgacagtctccccgccatactctccccggataggaaaacgcatgggctgcttgtcatgaaagaaagcgaatacgaaacacggcgtattgatgtggctttcccggttttgcatggcaaatgcggggaggatggtgcgatacaggggctgtttgtattgtctggtatcccctatgtgggctgtgatattcaaagctccgcagcttgcatggacaaatcactggcctacattcttacaaaaaatgcgggcatcgccgttcccgaatttcaaatgattgataaaggtgacaagccggaggcgggtgcgcttacctaccctgtctttgtgaagccggcacggtcaggttcgtcctttggcgtaaccaaagtaaacggtacggaagaacttaacgctgcgatagaagcggcaggacaatatgatggaaaaatcttaattgagcaagcgatttcgggctgtgaggtcgggtgtgcggtcatggggaacgaggatgatttgattgtcggcgaagtggatcaaatccggctgagccacggtatcttccgcatccatcaggaaaacgagccggaaaaaggctcagaaaatgcgatgattacagttcccgcagacattccggtcgaggaacgaaatcgggtgcaggaaacggcaaagaaagtatatcgggtgcttggatgcagagggcttgcccgtgttgatctttttttgcaggaggatggcggcatcgtt

SEQ ID NO: 1118 - DNA, 24 bp, Artificial Sequence
  Synthetic DNA Sequence
ttttcwgagcctttttccggctcg

SEQ ID NO: 1119 - DNA, 25 bp, Artificial Sequence
  Synthetic DNA Sequence
tttcgggctgtgaggtcggbtghgc

SEQ ID NO: 1120 - DNA, 24 bp, Artificial Sequence
  Synthetic DNA Sequence
tttcgggctgtgaggtcggbtghg

SEQ ID NO: 1121 - DNA, 22 bp, Artificial Sequence
  Synthetic DNA Sequence
tgtttgwattgtcyggyatccc

SEQ ID NO: 1122 - DNA, 18 bp, Artificial Sequence
  Synthetic DNA Sequence
tggtgcattgctacgtgg

SEQ ID NO: 1123 - DNA, 22 bp, Artificial Sequence
  Synthetic DNA Sequence
tttcgggctgtgaggtcggbtg

SEQ ID NO: 1124 - DNA, 22 bp, Artificial Sequence
  Synthetic DNA Sequence
gatttgrtccacytcgccraca

SEQ ID NO: 1125 - DNA, 20 bp, Artificial Sequence
  Synthetic DNA Sequence
actcacaactgggatggatg

SEQ ID NO: 1126 - DNA, 21 bp, Artificial Sequence
  Synthetic DNA Sequence
ttatggttgtgctggttgagg

SEQ ID NO: 1127 - DNA, 20 bp, Artificial Sequence
  Synthetic DNA Sequence
kcaaaygccatttcaagtaa

SEQ ID NO: 1128 - DNA, 20 bp, Artificial Sequence
  Synthetic DNA Sequence
gacgacyttatkgatataca

SEQ ID NO: 1129 - DNA, 23 bp, Artificial Sequence
  Synthetic DNA Sequence
atgatgachgamatgatgaaaac

SEQ ID NO: 1130 - DNA, 22 bp, Artificial Sequence
  Synthetic DNA Sequence
gactatccaagcatgcattatg

SEQ ID NO: 1131 - DNA, 22 bp, Artificial Sequence
  Synthetic DNA Sequence
catctggagctacrtarccagt

SEQ ID NO: 1132 - DNA, 20 bp, Artificial Sequence
  Synthetic DNA Sequence
agtgaaaaratggctgctgc

SEQ ID NO: 1133 - DNA, 23 bp, Artificial Sequence
  Synthetic DNA Sequence
catcaagaacactggctaygtag

SEQ ID NO: 1134 - DNA, 23 bp, Artificial Sequence
  Synthetic DNA Sequence
ctagatagagctaaaaccttcct

SEQ ID NO: 1135 - DNA, 23 bp, Artificial Sequence
  Synthetic DNA Sequence
cattatgcaaacgccatttcaag

SEQ ID NO: 1136 - DNA, 21 bp, Artificial Sequence
  Synthetic DNA Sequence
acttgtccacgttsgatrtct

SEQ ID NO: 1137 - DNA, 23 bp, Artificial Sequence
  Synthetic DNA Sequence
aattaatggctgcwgttgaygaa

SEQ ID NO: 1138 - DNA, 1032 bp, Enterococcus gallinarum
atgaaaaaaattgccgttttatttggagggaattctccagaatactcagtgtcactaacctcagcagcaagtgtgatccaagctattgacccgctgaaatatgaagtaatgaccattggcatcgcaccaacaatggattggtattggtatcaaggaaacctcgcgaatgttcgcaatgatacttggctagaagatcacaaaaactgtcaccagctgactttttctagccaaggatttatattaggagaaaaacgaatcgtccctgatgtcctctttccagtcttgcatgggaagtatggcgaggatggctgtatccaaggactgcttgaactaatgaacctgccttatgttggttgccatgtcgctgcctccgcattatgtatgaacaaatggctcttgcatcaacttgctgataccatgggaatcgctagtgctcccactttgcttttatcccgctatgaaaacgatcctgccacaatcgatcgttttattcaagaccatggattcccgatctttatcaagccgaatgaagccggttcttcaaaagggatcacaaaagtaactgacaaaacagcgctccaatctgcattaacgactgcttttgcttacggttctactgtgttgatccaaaaggcgatagcgggtattgaaattggctgcggcatcttaggaaatgagcaattgacgattggtgcttgtgatgcgatttctcttgtcgacggtttttttgattttgaagagaaataccaattaatcagcgccacgatcactgtcccagcaccattgcctctcgcgcttgaatcacagatcaaggagcaggcacagctgctttatcgaaacttgggattgacgggtctggctcgaatcgattttttcgtcaccaatcaaggagcgatttatttaaacgaaatcaacaccatgccgggatttactgggcactcccgctacccagctatgatggcggaagtcgggttatcctacgaaatattagtagagcaattgattgcactggcagaggaggacaaacgatga

SEQ ID NO: 1139 - DNA, 1768 bp, Enterococcus faecium
  strain BM4147
gatatcgttacgcttcatgtgccgctcaatacggatacgcactatattatcagccacgaacaaatacagagaatgaagcaaggagcatttcttatcaatactgggcgcggtccacttgtagatacctatgagttggttaaagcattagaaaacgggaaactgggcggtgccgcattggatgtattggaaggagaggaagagtttttctactctgattgcacccaaaaaccaattgataatcaatttttacttaaacttcaaagaatgcctaacgtgataatcacaccgcatacggcctattataccgagcaagcgttgcgtgataccgttgaaaaaaccattaaaaactgtttggattttgaaaggagacaggagcatgaatagaataaaagttgcaatactgtttgggggttgctcagaggagcatgacgtatcggtaaaatctgcaatagagatagccgctaacattaataaagaaaaatacgagccgttatacattggaattacgaaatctggtgtatggaaaatgtgcgaaaaaccttgcgcggaatgggaaaacgacaattgctattcagctgtactctcgccggataaaaaaatgcacggattacttgttaaaaagaaccatgaatatgaaatcaaccatgttgatgtagcattttcagctttgcatggcaagtcaggtgaagatggatccatacaaggtctgtttgaattgtccggtatcccttttgtaggctgcgatattcaaagctcagcaatttgtatggacaaatcgttgacatacatcgttgcgaaaaatgctgggatagctactcccgccttttgggttattaataaagatgataggccggtggcagctacgtttacctatcctgtttttgttaagccggcgcgttcaggctcatccttcggtgtgaaaaaagtcaatagcgcggacgaattggactacgcaattgaatcggcaagacaatatgacagcaaaatcttaattgagcaggctgtttcgggctgtgaggtcggttgtgcggtattgggaaacagtgccgcgttagttgttggcgaggtggaccaaatcaggctgcagtacggaatctttcgtattcatcaggaagtcgagccggaaaaaggctctgaaaacgcagttataaccgttcccgcagacctttcagcagaggagcgaggacggatacaggaaacggcaaaaaaaatatataaagcgctcggctgtagaggtctagcccgtgtggatatgtttttacaagataacggccgcattgtactgaacgaagtcaatactctgcccggtttcacgtcatacagtcgttatccccgtatgatggccgctgcaggtattgcacttcccgaactgattgaccgcttgatcgtattagcgttaaaggggtgataagcatggaaataggatttacttttttagatgaaatagtacacggtgttcgttgggacgctaaatatgccacttgggataatttcaccggaaaaccggttgacggttatgaagtaaatcgcattgtagggacatacgagttggctgaatcgcttttgaaggcaaaagaactggctgctacccaagggtacggattgcttctatgggacggttaccgtcctaagcgtgctgtaaactgttttatgcaatgggctgcacagccggaaaataacctgacaaaggaaagttattatcccaatattgaccgaactgagatgatttcaaaaggatacgtggcttcaaaatcaagccatagccgcg

SEQ ID NO: 1140 - DNA, 1086 bp, Enterococcus casseliflavus
gtaagaatcggaaaagcggaaggaagaaaaacatgaaaaaaatcgccattatttttggaggcaattcaccggaatacaccgtttctttagcttcagcaactagcgcaatcgaagcactccaatcatctccctatgactacgacctctctttgatcgggatcgccccagatgctatggattggtacttgtatacaggagaactggaaaacatccgacaagacacgtggttgttggatacgaaacataaacagaaaatacagccgctattcgaaggaaacggcttttggctaagtgaagagcagcaaacgttggtacctgatgttttatttcccattatgcatggcaaatacggggaagatggcagtatccaaggattgtttgaattgatgaagctgccttatgtaggctgcggggtggcaggttctgccttatgtatgaacaaatggctgctgcatcaagctgcagcagccattggcgtacaaagtgctcctacgattctcttgacaaatcaagccaaccagcaagaacaaatcgaagcttttatccagacccatggcttcccagttttctttaagcctaatgaagcgggctcctcaaaagggatcactaaagtcacctgcgttgaagaaatcgcttctgccttaaaagaagcctttacttattgttccgcagtgctcctacaaaaaaatattgccggtgttgagatcggttgcggtattttgggcaacgactctttgactgtcggtgcttgtgacgccatttcattagtagacggctttttcgattttgaagaaaagtaccagctgatcagcgccaaaatcaccgtccctgcgccattgcctgaaacgattgaaaccaaggtcaaagaacaagctcagctgctctatcgtagtcttggtcttaaaggtcttgctcgcatcgacttttttgtcacggagcgaggagaactatacttgaatgaaatcaatactatgccgggctttacgagtcactcccgctatcctgccatgatggcagcggtcggcttatcctatcaagaactactacaaaaactgcttgtcttagcaaaggaggaagtcaaatgag

SEQ ID NO: 1141 - DNA, 3946 bp, Enterococcus faecium
  strain BM4147
atgaataacatcggcattactgtttatggatgtgagcaggatgaggcagatgcattccatgctctttcgcctcgctttggcgttatggcaacgataattaacgccaacgtgtcggaatccaacgccaaatccgcgcctttcaatcaatgtatcagtgtgggacataaatcagagatttccgcctctattcttcttgcgctgaagagagccggtgtgaaatatatttctacccgaagcatcggctgcaatcatatagatacaactgctgctaagagaatgggcatcactgtcgacaatgtggcgtactcgccggatagcgttgccgattatactatgatgctaattcttatggcagtacgcaacgtaaaatcgattgtgcgctctgtggaaaaacatgatttcaggttggacagcgaccgtggcaaggtactcagcgacatgacagttggtgtggtgggaacgggccagataggcaaagcggttattgagcggctgcgaggatttggatgtaaagtgttggcttatagtcgcagccgaagtatagaggtaaactatgtaccgtttgatgagttgctgcaaaatagcgatatcgttacgcttcatgtgccgctcaatacggatacgcactatattatcagccacgaacaaatacagagaatgaagcaaggagcatttcttatcaatactgggcgcggtccacttgtagatacctatgagttggttaaagcattagaaaacgggaaactgggcggtgccgcattggatgtattggaaggagaggaagagtttttctactctgattgcacccaaaaaccaattgataatcaatttttacttaaacttcaaagaatgcctaacgtgataatcacaccgcatacggcctattataccgagcaagcgttgcgtgataccgttgaaaaaaccattaaaaactgtttggattttgaaaggagacaggagcatgaatagaataaaagttgcaatactgtttgggggttgctcagaggagcatgacgtatcggtaaaatctgcaatagagatagccgctaacattaataaagaaaaatacgagccgttatacattggaattacgaaatctggtgtatggaaaatgtgcgaaaaaccttgcgcggaatgggaaaacgacaattgctattcagctgtactctcgccggataaaaaaatgcacggattacttgttaaaaagaaccatgaatatgaaatcaaccatgttgatgtagcattttcagctttgcatggcaagtcaggtgaagatggatccatacaaggtctgtttgaattgtccggtatcccttttgtaggctgcgatattcaaagctcagcaatttgtatggacaaatcgttgacatacatcgttgcgaaaaatgctgggatagctactcccgccttttgggttattaataaagatgataggccggtggcagctacgtttacctatcctgtttttgttaagccggcgcgttcaggctcatccttcggtgtgaaaaaagtcaatagcgcggacgaattggactacgcaattgaatcggcaagacaatatgacagcaaaatcttaattgagcaggctgtttcgggctgtgaggtcggttgtgcggtattgggaaacagtgccgcgttagttgttggcgaggtggaccaaatcaggctgcagtacggaatctttcgtattcatcaggaagtcgagccggaaaaaggctctgaaaacgcagttataaccgttcccgcagacctttcagcagaggagcgaggacggatacaggaaacggcaaaaaaaatatataaagcgctcggctgtagaggtctagcccgtgtggatatgtttttacaagataacggccgcattgtactgaacgaagtcaatactctgcccggtttcacgtcatacagtcgttatccccgtatgatggccgctgcaggtattgcacttcccgaactgattgaccgcttgatcgtattagcgttaaaggggtgataagcatggaaataggatttacttttttagatgaaatagtacacggtgttcgttgggacgctaaatatgccacttgggataatttcaccggaaaaccggttgacggttatgaagtaaatcgcattgtagggacatacgagttggctgaatcgcttttgaaggcaaaagaactggctgctacccaagggtacggattgcttctatgggacggttaccgtcctaagcgtgctgtaaactgttttatgcaatgggctgcacagccggaaaataacctgacaaaggaaagttattatcccaatattgaccgaactgagatgatttcaaaaggatacgtggcttcaaaatcaagccatagccgcggcagtgccattgatcttacgctttatcgattagacacgggtgagcttgtaccaatggggagccgatttgattttatggatgaacgctctcatcatgcggcaaatggaatatcatgcaatgaagcgcaaaatcgcagacgtttgcgctccatcatggaaaacagtgggtttgaagcatatagcctcgaatggtggcactatgtattaagagacgaaccataccccaatagctattttgatttccccgttaaataaacttttaaccgttgcacggacaaactatataagctaactctttcggcaggaaacccgacgtatgtaactggttcttagggaatttatatatagtagatagtattgaagatgtaaggcagagcgatattgcggtcattatctgcgtgcgctgcggcaagatagcctgataataagactgatcgcatagaggggtggtatttcacaccgcccattgtcaacaggcagttcagcctcgttaaattcagcatgggtatcacttatgaaaattcatctacattggtgataatagtaaatccagtagggcgaaataattgactgtaatttacggggcaaaacggcacaatctcaaacgagattgtgccgtttaaggggaagattctagaaatatttcatacttccaactatatagttaaggaggagactgaaaatgaagaagttgttttttttattgttattgttattcttaatatacttaggttatgactacgttaatgaagcactgttttctcaggaaaaagtcgaatttcaaaattatgatcaaaatcccaaagaacatttagaaaatagtgggacttctgaaaatacccaagagaaaacaattacagaagaacaggtttatcaaggaaatctgctattaatcaatagtaaatatcctgttcgccaagaaagtgtgaagtcagatatcgtgaatttatctaaacatgacgaattaataaatggatacgggttgcttgatagtaatatttatatgtcaaaagaaatagcacaaaaattttcagagatggtcaatgatgctgtaaagggtggcgttagtcattttattattaatagtggctatcgagactttgatgagcaaagtgtgctttaccaagaaatgggggctgagtatgccttaccagcaggttatagtgagcataattcaggtttatcactagatgtaggatcaagcttgacgaaaatggaacgagcccctgaaggaaagtggatagaagaaaatgcttggaaatacgggttcattttacgttatccagaggacaaaacagagttaacaggaattcaatatgaaccatggcatattcgctatgttggtttaccacatagtgcgattatgaaagaaaagaatttcgttctcgaggaatatatggattacctaaaagaagaaaaaaccatttctgttagtgtaaatggggaaaaatatgagatcttttattatcctgttactaaaaataccaccattcatgtgccgactaatcttcgttatgagatatcaggaaacaatatagacggtgtaattgtgacagtgtttcccggatcaacacatactaattcaaggaggtaa

SEQ ID NO: 1142 - DNA, 25 bp, Artificial Sequence
  Synthetic DNA Sequence
gatcctctaaatgattctcaggtgg

SEQ ID NO: 1143 - DNA, 25 bp, Artificial Sequence
  Synthetic DNA Sequence
caattagcttagcaataggtgttgg

SEQ ID NO: 1144 - DNA, 20 bp, Artificial Sequence
  Synthetic DNA Sequence
tgtyttccaaggttcagctc

SEQ ID NO: 1145 - DNA, 20 bp, Artificial Sequence
  Synthetic DNA Sequence
aacatattkggttgataggt

SEQ ID NO: 1146 - DNA, 23 bp, Artificial Sequence
  Synthetic DNA Sequence
gggattacctatgccaatatgat

SEQ ID NO: 1147 - DNA, 24 bp, Artificial Sequence
  Synthetic DNA Sequence
agctgtgttagcvcgaacatcttg

SEQ ID NO: 1148 - DNA, 20 bp, Artificial Sequence
  Synthetic DNA Sequence
gactttgtttggcgtgatat

SEQ ID NO: 1149 - DNA, 20 bp, Artificial Sequence
  Synthetic DNA Sequence
tccyacwatttctttttgwg

SEQ ID NO: 1150 - DNA, 20 bp, Artificial Sequence
  Synthetic DNA Sequence
tgataatcacaccgcatacg

SEQ ID NO: 1151 - DNA, 20 bp, Artificial Sequence
  Synthetic DNA Sequence
tgctgtcatattgtcttgcc

SEQ ID NO: 1152 - DNA, 20 bp, Artificial Sequence
  Synthetic DNA Sequence
ataaagatgataggccggtg

SEQ ID NO: 1153 - DNA, 20 bp, Artificial Sequence
  Synthetic DNA Sequence
ctcgtatgtccctacaatgc

SEQ ID NO: 1154 - DNA, 20 bp, Artificial Sequence
  Synthetic DNA Sequence
gtttgaagcatatagcctcg

SEQ ID NO: 1155 - DNA, 21 bp, Artificial Sequence
  Synthetic DNA Sequence
cagtgcttcattaacgtagtc

SEQ ID NO: 1156 - DNA, 23 bp, Artificial Sequence
  Synthetic DNA Sequence
gttgaaatgcatcacgaacaatt

SEQ ID NO: 1157 - DNA, 23 bp, Artificial Sequence
  Synthetic DNA Sequence
aagaacgtttcagttaaggaaat

SEQ ID NO: 1158 - DNA, 19 bp, Artificial Sequence
  Synthetic DNA Sequence
aagaggtaatgtctgtggt

SEQ ID NO: 1159 - DNA, 18 bp, Artificial Sequence
  Synthetic DNA Sequence
tgaaggtttgccaggtga

SEQ ID NO: 1160 - DNA, 24 bp, Artificial Sequence
  Synthetic DNA Sequence
cgtttctgttaaagaaattagaag

SEQ ID NO: 1161 - DNA, 18 bp, Artificial Sequence
  Synthetic DNA Sequence
tccaggtgataacgttgg

SEQ ID NO: 1162 - DNA, 18 bp, Artificial Sequence
  Synthetic DNA Sequence
caagtccgtggaaatgca

SEQ ID NO: 1163 - DNA, 21 bp, Artificial Sequence
  Synthetic DNA Sequence
gttggtttcaacgttaagaac

SEQ ID NO: 1164 - DNA, 18 bp, Artificial Sequence
  Synthetic DNA Sequence
ggtttcaacgtcaagaac

SEQ ID NO: 1165 - DNA, 18 bp, Artificial Sequence
  Synthetic DNA Sequence
ggtttcaacgtgaagaac

SEQ ID NO: 1166 - DNA, 22 bp, Artificial Sequence
  Synthetic DNA Sequence
acgttaagaatgtttctgtcaa

SEQ ID NO: 1167 - DNA, 14 bp, Artificial Sequence
  Synthetic DNA Sequence
gttggtttcaacgt

SEQ ID NO: 1168 - DNA, 20 bp, Artificial Sequence
  Synthetic DNA Sequence
gaacaattggttgaaggtgt

SEQ ID NO: 1169 - DNA, 2160 bp, Streptococcus pneumoniae
  strain SP-665
atgaacaaaccaacgattctgcgcctaatcaagtatctgagcattagcttcttaagcttggttatcgcagccattgtcttaggcggaggagtttttttctactacgttagcaaggctcctagcctatccgagagtaaactagttgcaacaacttctagtaaaatctacgacaataaaaatcaactcattgctgacttgggttctgaacgccgcgtcaatgcccaagctaatgatattcccacagatttggttaaggcaatcgtttctatcgaagaccatcgcttcttcgaccacagggggattgattccatccgtatcctgggagctttcttgcgcaatctgcaaagtaattccctccaaggtggatcaactctcacccaacagttgattaagttgacttacttttcaacctcgacttccgaccagactatttctcgtaaggctcaggaagcttggttagcgattcagttagaacaaaaagcaaccaaacaggaaatcttgacctactatataaataaggtctacatgtctaatggcaactatggaatgcagacagcagctcaaaactactatggtaaagacctcaataatttaagtttacctcagttagccttgctggctggaatgcctcaggcaccaaaccaatatgacccctattcacatccagaagcagcccaagaccgccgaaacttggtcttatctgaaatgaaaaatcaaggttacatctctgctgaacagtatgagaaagcagtcaatacaccaattactgatggactacaaagtctcaaatcagcaagtaattaccctgcttacatggataattacctcaaggaggtcatcaatcaagtagaacaagaaactggctataaccttctaactactgggatggatgtttacacaaatgtagaccaagaagctcaaaaacatctgtgggatatctacaactccgatcaatacgtctcttaccctgacgatgatttgcaagtcgcatctacggtcgtagatgtttcaaatggtaaagtcatcgcccaacttggagctcgtcaccaagcaagtaacgtttcatttggtaccaaccaagctgtggaaaccaatcgtgactggggttctgctatgaaaccaatcaccgattatgcacctgccatagaatacggtgtttatgattccactgcaactatggttaatgatattccttataactatccgggaacaagcacacctgtctacaactgggatagagcatatttcggtaatattactctgcaatatgctcttcaacaatcacgaaatgtcacagccgttgagactttgaataaggtcggtctagatagagctaaaaccttccttaatggtcttggtatcgactatccaagcatgcattatgcaaacgccatttcaagtaatacaacagaatctaataaacaatacggagcaagtagtgaaaaaatggctgctgcttatgctgcctttgcaaatggtggcacttactataaaccaatgtatatccataaagtcgtcttcagtgatggaagtaaaaaagagttctctaatgtcggaactcgtgccatgaaggaaacgacagcctatatgatgaccgacatgatgaaaacagtcttgacttatggaactgggcgtggagcctatcttccttggcttcctcaagctggtaaaacaggaacctctaactatacagatgaggaagttgaaaaccacatcaagaacactggctatgtagctccagatgaaatgtttgttggttatactcgtaagtattctatggctgtatggacaggttattcgaatcgtttaactcctatcgttggagatggtttcctagttgcagctaaagtttatcgctcaatgataacgtatctatcagaagatactcatccagaagactggacgatgccagacggacttttcagaaacggggaatttgtattcaaaaatggagctcgcccaatatggactgaaccctctactcaacaatcctcaacagctgaaagttcaagctcatcatcagatagttcaacttcacagtctagctcaaccactccaagcacaaataatagtacgactaccaatcctaacaataatacgcaacaatcaaatacaacccctgatcaacaaaatcagaatcctcaaccagcacaaccataa

SEQ ID NO: 1170 - DNA, 20 bp, Artificial Sequence
  Synthetic DNA Sequence
acgaattggactacgcaatt

SEQ ID NO: 1171 - DNA, 20 bp, Artificial Sequence
  Synthetic DNA Sequence
acgaggatgatttgattgtc

SEQ ID NO: 1172 - DNA, 1560 bp, Streptococcus pneumoniae
  strain 64147
gatcctctaaatgattctcaggtggctgttattgcctctatttcaaaggagatgcctggcattagtatttctacttcttgggatagaaaggttttggaaacttccctttcttctatagttgggagtgtatccagtgaaaaagctggtctcccagcggaagaagcagaagcctatcttaaaaaaggctattctctaaatgaccgtgtaggaacctcctatttggaaaagcaatatgaagagaccttacaaggaaaacgctcggtaaaagaaatccatctggacaaatatggcaacatggaaagcgtggatacaattgaggaaggtagtaagggaaacaatatcaagctgaccattgatttggccttccaagatagcgtggatgctttgctgaaaagttatttcaattcagagttgggaaatggtggagccaagtattctgaaggtgtctatgcagtcgcccttaacccaaaaacaggtgctgttttgtctatgtcaggaattaaacatgacttgaaaacaggagagttgacgccggattccttgggaacggtaaccaatgtctttgtcccaggttcggttgtcaaagcagcgaccatcagctctggttgggaaaatggagtcttgtcaggaaatcagaccttgacagaccagtccattgtctttcaaggttcagctccaattaattcttggtatcctgccttttctagaccaatgccgattacggcggttcaggctctagagtattcatccaatgcttatatggtccaaacagccctaggtcttatggggcagacctatcaacccaatatgtttgtcggcaccagcaatctagagtctgctatggggaaattgcgttcaacctttggtgaatatggtttgggttctgcgaccggaattgacctaccagatgaatctactggatttgttcccaaagagtatagctttgctaatttcattaccaatgcctttgggcagtttgataactatacgccgatgcagttggctcagtatgtagcaactattgcaaatgatggtgttcgtgtggctcctcgtattgttgaaggcatttatggtaataatgataagggaggactgggtgacttgattcagcaactgcaaccgacagagatgaataaggtcaatatatccgactccgatatgagcatcttgcaccaaggtttttatcaggttgcccatggtactagtgaattgacaactggacgtgccttttcaaatggcgccttggtatccattagcggaaaaacaggtacagccgaaagctatgtggcagatggtcagcaagcaaccaataccaatgcggtggcctatgccccatctgataatccccaaatcgctgtagctgttgtcttccctcataacaccaaccttacaaatggtgtcggaccttccattgcgcgcgatattatcaacctctataaccaacatcatccaatgaattagaaaggaacatatgctttatccaacacctattgctaagctaattgacagttattcgaagttaccgggtatcgggattaagacggctacccgtttggcctt

SEQ ID NO: 1173 - DNA, 2007 bp, Streptococcus pneumoniae
  strain CS109
gagtcccgattgctgaggatgcaacctcctataatgtctatgcggtcattgatgagaactataagtcagcaacgggtaagattctttacgtagaaaaaacacaatttaacaaggttgcagaggtctttcataagtatctggacatggaagaatcctatgtaagagagcaactctcgcaacctaatctcaagcaagtttcctttggagcaaagggaaatgggattacctatgccaatatgatgactatcaaaaaagagttggaaactgcagaggtcaaggggattgattttacaaccagtcccaatcgtagttatccaaacggacaatttgcttctagttttatcggtctagctcagctccatgaaaatgaagatggcagcaagagcttgctgggaacttctggaatggagagttccttgaacagtattcttgcagggacagacggcattattacctatgaaaaggatcgtctgggcaatattgtacccggaacagaactggtatcgcaacaaactgtggatggcaaggatgtttatacaacattgtctagtccgctacaatctttcatggaaactcagatggatgcctttctagaaaaagtaaaaggtaagtatatgaccgcgaccttggtcagtgcaaagaccggtgaaattctcgctaccacccaacgacctacctttaatgcagatactaaagaaggaatcactgaggactttgtttggcgtgatattctttatcaaagtaactatgaaccaggatcagcctttaaggtcatgatgttagcttcttctattgataataataccttcccaagtggagaatacttcaatagcagtgaattcaaaatagcggatgcgacgactcgagattgggatgttaatgagggtttgactactggtgggatgatgactttctcacaaggtttcgctcactccagtaatgttggaacgagtctacttgaacaaaaaatgggagatgctacttggttggattatctaaaacgctttaaatttggggttccaactcgctttggcttgacagatgaatacgctggtcaacttccagctgataatattgttagtattgctcaaagctcatttgggcaaggaatttcagtgacacaaacacaaatgcttcgtgcctttacagctattgctaatgatggagttatgctggagccaaaatttataagtgctatttatgatactaacaatcagtctgtacgtaagtcacaaaaagaaatagtaggaaatcctgtttccaaagaggcagcaagcacaactcgaaatcacatgatcttagttgggacggaccctctatatggaactatgtataatcactacacaggaaagccaattataacagttcctggacaaaatgtagcagttaaatccggtacggctcaaatcgctgatgagaaaaatggaggatacttggttggttctaccaattatattttctcagttgtgactatgaatcctgctgaaaatcctgattttatcttgtatgtaacggttcaacagcctgagcattattcaggtatccagttgggagaatttgccaccccaatcttggagcgggcttcagctatgaaagaatctctcaatcttcaatctccagccaaaaatttagataaagttacgacagaatcttcttatgcaatgcctagcatcaaggatatttcacctggtgagttggcggaagccttacgccgaaatattgtgcaaccaatcgttgtaggtactggaacaaagattaaagagacttctgtagaagaagggaccaatcttgcaccaaaccaacaagttctccttttatcggataaggtagaagaaattccagacatgtatagctggaaaaaagagactgccgagacctttgctaaatggttggatattgaactggaatttgaaggttcaggttccgttgttcagaagcaagatgttcggactaatacagctatcaaaaacattaaaaaaattaaattaactttaggagactaatatg

SEQ ID NO: 1174 - DNA, 18 bp, Artificial Sequence
  Synthetic DNA Sequence
gaacgtggtgaagttcgc

SEQ ID NO: 1175 - DNA, 21 bp, Artificial Sequence
  Synthetic DNA Sequence
gttactggtgtagaaatgttc

SEQ ID NO: 1176 - DNA, 19 bp, Artificial Sequence
  Synthetic DNA Sequence
tactggtgtagaaatgttc

SEQ ID NO: 1177 - DNA, 20 bp, Artificial Sequence
  Synthetic DNA Sequence
gctcaacaagttccagatta

SEQ ID NO: 1178 - DNA, 2456 bp, Staphylococcus aureus
  NCTC  8325
atgaactgattatacttaacattaaaaaagatgataacaccttctacacctccatatcacaaaaaattataacattattttgacataaatactacatttgtaatatactacaaatgtagtcttatataaggaggatattgatgaaaaagataaaaattgttccacttattttaatagttgtagttgtcgggtttggtatatatttttatgcttcaaaagataaagaaattaataatactattgatgcaattgaagataaaaatttcaaacaagtttataaagatagcagttatatttctaaaagcgataatggtgaagtagaaatgactgaacgtccgataaaaatatataatagtttaggcgttaaagatataaacattcaggatcgtaaaataaaaaaagtatctaaaaataaaaaacgagtagatgctcaatataaaattaaaacaaactacggtaacattgatcgcaacgttcaatttaattttgttaaagaagatggtatgtggaagttagattgggatcatagcgtcattattccaggaatgcagaaagaccaaagcatacatattgaaaatttaaaatcagaacgtggtaaaattttagaccgaaacaatgtggaattggccaatacaggaacacatatgagattaggcatcgttccaaagaatgtatctaaaaaagattataaagcaatcgctaaagaactaagtatttctgaagactatatcaacaacaaatggatcaaaattgggtacaagatgataccttcgttccactttaaaaccgttaaaaaaatggatgaatatttaagtgatttcgcaaaaaaatttcatcttacaactaatgaaacagaaagtcgtaactatcctctagaaaaagcgacttcacatctattaggttatgttggtcccattaactctgaagaattaaaacaaaaagaatataaaggctataaagatgatgcagttattggtaaaaagggactcgaaaaactttacgataaaaagctccaacatgaagatggctatcgtgtcacaatcgttgacgataatagcaatacaatcgcacatacattaatagagaaaaagaaaaaagatggcaaagatattcaactaactattgatgctaaagttcaaaagagtatttataacaacatgaaaaatgattatggctcaggtactgctatccaccctcaaacaggtgaattattagcacttgtaagcacaccttcatatgacgtctatccatttatgtatggcatgagtaacgaagaatataataaattaaccgaagataaaaaagaacctctgctcaacaagttccagattacaacttcaccaggttcaactcaaaaaatattaacagcaatgattgggttaaataacaaaacattagacgataaaacaagttataaaatcgatggtaaaggttggcaaaaagataaatcttggggtggttacaacgttacaagatatgaagtggtaaatggtaatatcgacttaaaacaagcaatagaatcatcagataacattttctttgctagagtagcactcgaattaggcagtaagaaatttgaaaaaggcatgaaaaaactaggtgttggtgaagatataccaagtgattatccattttataatgctcaaatttcaaacaaaaatttagataatgaaatattattagctgattcaggttacggacaaggtgaaatactgattaacccagtacagatcctttcaatctatagcgcattagaaaataatggcaatattaacgcacctcacttattaaaagacacgaaaaacaaagtttggaagaaaaatattatttccaaagaaaatatcaatctattaaatgatggtatgcaacaagtcgtaaataaaacacataaagaagatatttatagatcttatgcaaacttaattggcaaatccggtactgcagaactcaaaatgaaacaaggagaaagtggcagacaaattgggtggtttatatcatatgataaagataatccaaacatgatgatggctattaatgttaaagatgtacaagataaaggaatggctagctacaatgccaaaatctcaggtaaagtgtatgatgagctatatgagaacggtaataaaaaatacgatatagatgaataacaaaacagtgaagcaatccgtaacgatggttgcttcactgttttattatgaattattaataagtgctgttacttctcccttaaatacaatttcttcattttcattgtatgttgaaagtgacactgtaacgagtccattttctttttttatggatttcttatttgtaatttcagcgataacgtacaatgtattacctggtatacagtttaataaatttaacgttattcatttgtgttcctgctacaacttcttctccgtatttaccttcttctacccataatttaaatgatattgaaagtgtatgcatgc

SEQ ID NO: 1179 - DNA, 20 bp, Artificial Sequence
  Synthetic DNA Sequence
atttggtgacgggtgacttt

SEQ ID NO: 1180 - DNA, 19 bp, Artificial Sequence
  Synthetic DNA Sequence
tccaccgttgccaatcgca

SEQ ID NO: 1181 - DNA, 20 bp, Artificial Sequence
  Synthetic DNA Sequence
agcagcttactagatgccgt

SEQ ID NO: 1182 - DNA, 20 bp, Artificial Sequence
  Synthetic DNA Sequence
aactgcaagagatcctttgg

SEQ ID NO: 1183 - DNA, 2535 bp, Streptococcus pneumoniae
  strain 175
atggcgatagaaaagctatcacccggcatgcaacagtatgtggatattaaaaagcaatatccagatgcttttttgctctttcggatgggtgatttttatgaattattttatgaggatgcggtcaatgctgcgcagattctggaaatttccttaacgagtcgcaacaagaatgccgacaatccgatccctatggcgggtgttccctatcattctgcccaacagtatatcgatgtcttgattgagcagggttataaggtggctatcgcagagcagatggaagatcctaaacaagcagttggggttgttaaacgagaggttgttcaggtcattacgccagggacagtggtcgatagcagtaagccggacagtcagaataattttttggtttccatagaccgcgaaggcaatcaatttggcctagcttatatggatttggtgacgggtgacttttatgtgacaggtcttttggatttcacgctggtttgtggggaaatccgtaacctcaaggctcgagaagtggtgttgggttatgacttgtctgaggaagaagaacaaatcctcagccgccagatgaatctggtactctcttatgaaaaagaaagctttgaagaccttcatttattggatttgcgattggcaacggtggagcaaacggcatctagtaagctgctccagtatgttcatcggactcagatgagggaattgaaccacctcaaacctgttatccgctacgaaattaaggatttcttgcagatggattatgcgaccaaggctagtctggatttggttgagaatgctcgctcaggtaagaaacaaggcagtcttttctggcttttggatgaaaccaaaacggctatggggatgcgtctcttgcgttcttggattcatcgccccttgattgataaggaacgaatcgtccaacgtcaagaagtagtgcaggtctttctcgaccatttctttgagcgtagtgacttgacagacagtctcaagggtgtttatgacattgagcgcttggctagtcgtgtttcttttggcaaaaccaatccaaaggatctcttgcagttggcgactaccttgtctagtgtgccacggattcgtgcgattttagaagggatggagcaacctactctagcctatctcatcgcacaactggatgcaatccctgagttggagagtttgattagcgcagcgattgctcctgaagctcctcatgtgattacagatgggggaattatccggactggatttgatgagactttagacaagtatcgttgcgttctcagagaagggactagctggattgctgagattgaggctaaggagcgagaaaactctggtatcagcacgctcaagattgactacaataaaaaggatggctactattttcatgtgaccaattcgcaactgggaaatgtgccagcccactttttccgcaaggcgacgctgaaaaactcagaacgctttggaaccgaagaattagcccgtatcgagggagatatgcttgaggcgcgtgagaagtcagccaacctcgaatacgaaatatttatgcgcattcgtgaagaggtcggcaagtacatccagcgtttacaagctctagcccaaggaattgcgacggttgatgtcttacagagtctggcggttgtggctgaaacccagcatttgattcgacctgagtttggtgacgattcacaaattgatatccggaaagggcgccatgctgtcgttgaaaaggttatgggggctcagacctatattccaaatacgattcagatggcagaagataccagtattcaattggttacagggccaaacatgagtgggaagtctacctatatgcgtcagttagccatgacggcggttatggcccagctgggttcctatgttcctgctgaaagcgcccatttaccgatttttgatgcgatttttacccgtatcggagcagcagatgacttggtttcgggtcagtcaacctttatggtggagatgatggaggccaataatgccatttcgcatgcgaccaagaactctctcattctctttgatgaattgggacgtggaactgcaacttatgacgggatggctcttgctcagtccatcatcgaatatatccatgagcacatcggagctaagaccctctttgcgacccactaccatgagttgactagtctggagtctagtttacaacacttggtcaatgtccacgtggcaactttggagcaggatgggcaggtcaccttccttcacaagattgaaccgggaccagctgataaatcctacggtatccatgttgccaagattgctggcttgccagcagaccttttagcaagggcggataagattttgactcagctagagaatcaaggaacagagagtcctcctcccatgagacaaactagtgctgtcactgaacagatttcactctttgatagggcagaagagcatcctatcctagcagaattagctaaactggatgtgtataatatgacacctatgcaggttatgaatgtcttagtagagttaaaacagaaactataa

SEQ ID NO: 1184 - DNA, 623 bp, Streptococcus pneumoniae
  strain StrR-05
tgacgggtgacttttatgtgacaggtcttttggatttcacgctggtttgtggggaaatccgtaacctcaaggctcgagaagtggtgttgggttatgacttgtctgaggaagaagaacaaatcctcagccgccagatgaatctggtactctcttatgaaaaagaaagctttgaagaccttcatttattggatttgcgattggcaacggtggagcaaacggcatctagtaagctgctccagtatgttcatcggactcagatgagggaattgaaccacctcaaacctgttatccgatacgaaattaaggatttcttgcagatggattatgcgaccaaggctagtctggatttggttgagaatgctcgctcaggtaagaaacaaggcagtcttttctggcttttggatgaaaccaaaacggctatggggatgcgtctcttgcgttcttggattcatcgccccttgattgataaggaacgaatcgtccaacgtcaagaagtagtgcaggtctttctcgaccatttctttgagcgtagtgacttgacagacagtctcaagggtgtttatgacattgagcgcttggctagtcgtgtttcttttggcaaaaccaatccaaaggatctcttg

SEQ ID NO: 1185 - DNA, 621 bp, Streptococcus pneumoniae
  strain StrR-06
tgacgggtgacttttatgtgacaggtcttttggatttcacgctggtttgtggggaaatccgtaacctcaaggctcgagaagtggtgttgggttatgacttgtctgaggaagaagaacaaatcctcagccgccagatgaatctggtactctcttatgaaaaagaaagctttgaagaccttcatttattggatttgcgattggcaacggtggagcaaacggcatctagtaagctgctccagtatgttcatcggactcagatgagggaattgaaccacctcaaacctgttatccgatacgaaattaaggatttcttgcagatggattatgcgaccaaggctagtctggatttggttgagaatgctcgctcaggtaagaaacaaggcagtcttttctggcttttggatgaaaccaaaacggctatggggatgcgtctcttgcgttcttggattcatcgccccttgattgataaggaacgaatcgtccaacgtcaagaagtagtgcaggtctttctcgaccatttctttgagcgtagtgacttgacagacagtctcaagggtgtttatgacattgagcgcttggctagtcgtgtttcttttggcaaaaccaatccaaaggatctct

SEQ ID NO: 1186 - DNA, 622 bp, Streptococcus pneumoniae
  strain StrR-11
tgacgggtgacttttatgtgacaggtcttttggatttcacgctggtttgtggggaaatccgtaacctcaaggctcgagaagtggtgttgggttatgacttgtctgaggaagaagaacaaatcctcagccgccagatgaatctggtactctcttatgaaaaagaaagctttgaagaccttcatttattggatttgcgattggcaacggtggagcaaacggcatctagtaagctgctccagtatgttcatcggactcagatgagggaattgaaccacctcaaacctgttatccgctacgaaattaaggatttcttgcagatggattatgcgaccaaggctagtctggatttggttgagaatgctcgctcaggtaagaaacaaggcagtcttttctggcttttggatgaaaccaaaacggctatggggatgcgtctcttgcgttcttggattcatcgccccttgattgataaggaacgaatcgtccaacgtcaagaagtagtgcaggtctttctcgaccatttctttgagcgtagtgacttgacagacagtctcaagggtgtttatgacattgagcgcttggctagtcgtgtttcttttggcaaaaccaatccaaaggatctctt

SEQ ID NO: 1187 - DNA, 622 bp, Streptococcus pneumoniae
  strain StrR-55
tgacgggtgacttttatgtgacaggtcttttggatttcacgctggtttgtggggaaatccgtaacctcaaggctcgagaagtggtgttgggttatgacttgtctgaggaagaagaacaaatcctcagccgccagatgaatctggtactctcttatgaaaaagaaagctttgaagaccttcatttattggatttgcgattggcaacggtggagcaaacggcatctagtaagctgctccggtatgttcatcggactcagatgagggaattgaaccacctcaaacctgttatccgctacgaaattaaggatttcttgcagatggattatgcgaccaaggctagtctggatttggttgagaatgctcgctcaggtaagaaacaaggcagtcttttctggcttttggatgaaaccaaaacggctatggggatgcgtctcttgcgttcttggattcatcgccccttgattgataaggaacgaatcgtccaacgtcaagaagtagtgcaggtctttctcgaccatttctttgagcgtagtgacttgacagacagtctcaagggtgtttatgacattgagcgcttggctagtcgtgtttcttttggcaaaaccaatccaaaggatctctt

SEQ ID NO: 1188 - DNA, 599 bp, Streptococcus oralis
  ref <308>: DATABASE ACCESSION NUMBER: ATCC 35037
gggtgacttttatgtaacggggctattggatttcacgttggtttgtggggaaattcgcaatctcaaggctagagaagtggtgctgggttatgacttgtctgaggaagaagaacaaatcctcagtcgtcagatgaatctggtgctttcttatgagaaggaaggctttgaggaccttcatttactggatccacgactggcagctgtggagcaagcggcagctagtaagctcctccagtatgttcaccggacccagatgcgggaattgaaccacctcaaaccagttatccgctatgaaatcaaagatttcttacagatggactatgcgaccaaggctagtctggatttggttgagaatgcccgttcaggcaagaagcaaggcagtcttttctggcttttagatgaaaccaagacggctatgggaatgcgtctcttgcgttcttggattcatcgtcctttgattgataaggagcgaatcgtccagcgtcaagaggtggtgcaggtctttcttgaccacttctttgagcgtagtgatttaacggacagtcttaagggtgtttatgatatcgaacgcttggctagtcgggtttcttttggcaaga

SEQ ID NO: 1189 - DNA, 624 bp, Streptococcus mitis
  ref <308>: DATABASE ACCESSION NUMBER: ATCC 49456
ggtgacgggtgacttttatgtgacaggtcttttggattttacgctggtttgtggggaaatccgcaatctcaaggctcgagaagtggtgctgggttatgacttgtctgaggaagaagaacagatccttagtcgtcagatgaatctggtactttcctatgaaaaagaaggctttgaagaccttcatttactggattcacgattggcagctgtggagcaagcggcatctagtaaactgcttcagtatgttcatcggactcagatgagggaattgaaccacctcaagcctgttatccgctatgaaatcaaagattttttgcagatggattatgcgaccaaggctagtctggatttggttgagaatgcccgttcaggcaagaagcaaggtagtcttttttggcttttggatgaaaccaaaacagctatgggaatgcgtctcttgcggtcttggattcatcgccccctgattgataaggaacgaattgtccaacgccaagaagttgtgcaggtctttctcgaccatttctttgagcgtagtgatttgacagacagtctcaagggtgtttatgacattgagcgcttggctagtcgtgtttcttttggcaaaaccaatccaaaggatctctt

SEQ ID NO: 1190 - DNA, 599 bp, Streptococcus mitis
  strain LSPQ 2583
tgacgggtgactttcaggtgactagtttagaggactttgtcttggtctgcggggaaatccgcaatttgaaagctagggaagtggtgctgggctatgccttgccagaagctgaggagcaggttttggctggacagatgaaccttttactgtcctatgtggagaaggttttggaggatgttcagctgctgggcgaggagctgtctcctatggagcgtcaggcagcagggaaactgctggagtatgtgcaccggacccagatgagggagctcagccatttgaagaaggctcagcattatgaaatcaaggacttcctgcaaatggactatgccaccaaggcgagtctggatttgacagaaaatgctcgctcgggcaagaagcacggcagtctttattggctgatggacgagactaagacggccatgggcggccgcatgctgcgctcttggatccagcgtccgctgattgatgaagcgcgaattagccagcgacagaatgtcgttgaggtttttctggatcatttctttgagcggagtgatttgacggagagcctcaagggggtctatgatatcgagcggctggctagtcgggtgtcttttggc

SEQ ID NO: 1191 - DNA, 622 bp, Streptococcus mitis
  ref <308>: DATABASE ACCESSION NUMBER: ATCC 903
tgacgggtgactttcaggtgactagtttagaggactttgccctggtctgcggggaaatccgtaatttgaaggctagggaagtggtgctgggctatgctttgccagaagctgaggagcaggtcttggctggacagatgaatcttttgctgtcctatgtacagacggccttggacgatgtccagctgctgggcgaggaactgtctcctatggagcgtcaggcagcggggaaattgctagagtatgtgcaccggacccagatgagggagctcagccatttgaagaaggcccagcattatgaaatcaaggactttctgcaaatggattatgctaccaaggcgagtctggatttgacagaaaatgctcgctcgggtaagaaacacggcagtctttattggctgatggacgagaccaagacggccatgggcggccgtatgctgcgctcttggatccagcgtccgttgattgatgaagtgcgaattagccagcggcagaatgtcgtcgaggtttttctggaacatttctttgagcggagtgatttgacggagagcctcaagggagtctatgatatcgagcggctggctagtcgggtgtcttttggcaagaccaatccaaaggatctctt

SEQ ID NO: 1192 - DNA, 22 bp, Artificial Sequence
  Synthetic DNA Sequence
ggtaaaacaggaacctctaact

SEQ ID NO: 1193 - DNA, 22 bp, Artificial Sequence
  Synthetic DNA Sequence
ggtaagacaggtacttctaact

SEQ ID NO: 1194 - DNA, 24 bp, Artificial Sequence
  Synthetic DNA Sequence
catttcaagtaatacaacagaatc

SEQ ID NO: 1195 - DNA, 24 bp, Artificial Sequence
  Synthetic DNA Sequence
catttcaagtaacacaactgaatc

SEQ ID NO: 1196 - DNA, 24 bp, Artificial Sequence
  Synthetic DNA Sequence
gccatttcaagtaatacaacagaa

SEQ ID NO: 1197 - DNA, 25 bp, Artificial Sequence
  Synthetic DNA Sequence
caaacgccatttcaagtaatacaac

SEQ ID NO: 1198 - DNA, 381 bp, Staphylococcus saprophyticus
  ref <308>: DATABASE ACCESSION NUMBER: ATCC 43867
aacgggcgtctcgatagaaaaacacgtgaaaatcccaatgattataaacaatcaatatacgattttgctgaagctgtaacaaaaggtattaaggaacaaacaaataaaaattaataggcaacttaaccagaatcgttaaaactatatgacgattctggttttttaaattcaaaaagttttctaaaaaatttacttgcttctttaaagtataggtatgaaatacaattgattaaaatagtaaaggaaatgaatcatgaaacaattaactaagcctttatacttttacctattactttttattacaacaacgctgattggcgcgttactattatatttgccaatcacakgtaaacatcctattgattttgtggacgcccgtta

SEQ ID NO: 1199 - DNA, 25 bp, Artificial Sequence
  Synthetic DNA Sequence
gtattaaagaagatatccaaaaagc

SEQ ID NO: 1200 - DNA, 25 bp, Artificial Sequence
  Synthetic DNA Sequence
tcaaagaagaaactaaaaaagctgt

SEQ ID NO: 1201 - DNA, 19 bp, Artificial Sequence
  Synthetic DNA Sequence
aacgtaggtgtccttcttc

SEQ ID NO: 1202 - DNA, 22 bp, Artificial Sequence
  Synthetic DNA Sequence
gtgttgaaatgttccgtaaaca

SEQ ID NO: 1203 - DNA, 21 bp, Artificial Sequence
  Synthetic DNA Sequence
  modified_base (3): i
  modified_base (9): i
  modified_base (12): i
ggngarmgnggnaaygaratg

SEQ ID NO: 1204 - DNA, 21 bp, Artificial Sequence
  Synthetic DNA Sequence
  modified_base (3): i
  modified_base (10): i
  modified_base (13): i
gcnaayaacntcnwmyatgcc

SEQ ID NO: 1205 - DNA, 20 bp, Artificial Sequence
  Synthetic DNA Sequence
  modified_base (6): i
  modified_base (9): i
  modified_base (18): i
aayacntcnawyatgccngt

SEQ ID NO: 1206 - DNA, 19 bp, Artificial Sequence
  Synthetic DNA Sequence
  modified_base (3): i
  modified_base (6): i
  modified_base (9): i
  modified_base (15): i
cknsrngtngartcngcca

SEQ ID NO: 1207 - DNA, 20 bp, Artificial Sequence
  Synthetic DNA Sequence
  modified_base (3): i
  modified_base (6): i
  modified_base (12): i
ccntcntcwccnggcatytc

SEQ ID NO: 1208 - DNA, 25 bp, Artificial Sequence
  Synthetic DNA Sequence
tcaaaaagttttctaaaaaatttac

SEQ ID NO: 1209 - DNA, 25 bp, Artificial Sequence
  Synthetic DNA Sequence
acgggcgtccacaaaatcaatagga

SEQ ID NO: 1210 - DNA, 22 bp, Artificial Sequence
  Synthetic DNA Sequence
accagcttgcccaatacaaagg

SEQ ID NO: 1211 - DNA, 24 bp, Artificial Sequence
  Synthetic DNA Sequence
attcttgtaacaggctttgatccc

SEQ ID NO: 1212 - DNA, 23 bp, Artificial Sequence
  Synthetic DNA Sequence
  modified_base (3): i
  modified_base (6): i
  modified_base (9): i
  modified_base (12): i
  modified_base (15): i
  modified_base (18): i
ccnccnrgnggnganacngcwcc

SEQ ID NO: 1213 - DNA, 26 bp, Artificial Sequence
  Synthetic DNA Sequence
  modified_base (6): i
  modified_base (9): i
  modified_base (12): i
  modified_base (15): i
  modified_base (18): i
  modified_base (24): i
aarggnggnacngcngcnathccngg

SEQ ID NO: 1214 - DNA, 23 bp, Artificial Sequence
  Synthetic DNA Sequence
ggtaaaacaggtacctctaacta

SEQ ID NO: 1215 - DNA, 1337 bp, Streptococcus pyogenes
  strain D471
aacaaaataaaagaacttacctattttccatccaaaatgtttagcaatcatcatctgcaaggcaacgtattgcatggcattgatgtgatgagcaactaatatgtcattagaacgttgcgtcaaactagcatctaaataaagatcgaaatgcagttatcaaaaatgcaagctcctatcggcccttgttttaattattactcacattgccttaatgtatttacttgcttattattaacttttttgctaagttagtagcgtcagttattcattgaaaggacattattatgaaaattcttgtaacaggctttgatccctttggcggcgaagctattaatcctgcccttgaagctatcaagaaattgccagcaaccattcatggagcagaaatcaaatgtattgaagttccaacggtttttcaaaaatctgccgatgtgctccagcagcatatcgaaagctttcaacctgatgcagtcctttgtattgggcaagctggtggccggactggactaacgccagaacgcgttgccattaatcaagacgatgctcgcattcctgataacgaagggaatcagcctattgatacacctattcgtgcagatggtaaagcagcttatttttcaaccttgccaatcaaagcgatggttgctgccattcatcaggctgggcttcctgcttctgtttctaatacagctggtacctttgtttgcaatcatttgatgtatcaagccctttacttagtggataaatattgtccaaatgccaaagctgggtttatgcatattccctttatgatggaacaggttgttgataaacctaatacagctgccatgaacctcgatgatattacaagaggaattgaggctgctatttttgccattgtcgatttcaaagatcgttccgatttaaaacgtgtagggggcgctactcactgactgtgacgctactaaacctattttaaaaaaacagagatatgaactaactctgttttttttgtgctaaaaatgaaagacctagggaaacttttcatcggtctttctcaattgtcatcttaatctaatactacttctaacatcagcgggtatagtttgccagtaattaagaaacgttgttgatctaaatgagcaatcccattcaaaacattaaggtcagggtaatgggacttatcaagatttaaggcttttaacaaaggactaatatcataggtggctaccacctttccagaatcaggttggagtttgacaatagtattggtttgccaaatattggcatagagataaccatctacatactctaattcgttaagcattgagatagggacactttctatagcaactagt

SEQ ID NO: 1216 - DNA, 23 bp, Artificial Sequence
  Synthetic DNA Sequence
ggtaagactggtacatcaaacta

SEQ ID NO: 1217 - DNA, 25 bp, Artificial Sequence
  Synthetic DNA Sequence
caaatgccatttcaagtaacacaac

SEQ ID NO: 1218 - DNA, 25 bp, Artificial Sequence
  Synthetic DNA Sequence
caaacgccatttcaagtaacacaac

SEQ ID NO: 1219 - DNA, 25 bp, Artificial Sequence
  Synthetic DNA Sequence
caaatgctatttcaagtaatacaac

SEQ ID NO: 1220 - DNA, 25 bp, Artificial Sequence
  Synthetic DNA Sequence
caaacgccatttcaagtaatacgac

SEQ ID NO: 1221 - DNA, 23 bp, Artificial Sequence
  Synthetic DNA Sequence
  modified_base (6): i
  modified_base (9): i
  modified_base (12): i
  modified_base (18): i
gayacnccnggncaygtngaytt

SEQ ID NO: 1222 - DNA, 26 bp, Artificial Sequence
  Synthetic DNA Sequence
  modified_base (9): i
  modified_base (12): i
  modified_base (15): i
  modified_base (21): i
atygayacnccnggncaygtngaytt

SEQ ID NO: 1223 - DNA, 26 bp, Artificial Sequence
  Synthetic DNA Sequence
  modified_base (3): i
  modified_base (6): i
  modified_base (12): i
  modified_base (24): i
ayntcnarrtgnarytcrcccatncc

SEQ ID NO: 1224 - DNA, 24 bp, Artificial Sequence
  Synthetic DNA Sequence
  modified_base (3): i
  modified_base (6): i
  modified_base (9): i
  modified_base (12): i
  modified_base (18): i
  modified_base (21): i
ccngynhtnytngarccnatnatg

SEQ ID NO: 1225 - DNA, 26 bp, Artificial Sequence
  Synthetic DNA Sequence
  modified_base (3): i
  modified_base (15): i
  modified_base (18): i
  modified_base (21): i
  modified_base (24): i
tanccraacatytcnsmnarnggnac

SEQ ID NO: 1226 - DNA, 20 bp, Artificial Sequence
  Synthetic DNA Sequence
  modified_base (3): i
  modified_base (9): i
gtnrmrtanccraacatytc

SEQ ID NO: 1227 - DNA, 26 bp, Artificial Sequence
  Synthetic DNA Sequence
  modified_base (3): i
  modified_base (6): i
  modified_base (9): i
  modified_base (12): i
  modified_base (24): i
gtnccnytnkcngaratgttyggnta

SEQ ID NO: 1228 - DNA, 29 bp, Artificial Sequence
  Synthetic DNA Sequence
  modified_base (3): i
  modified_base (6): i
  modified_base (9): i
  modified_base (12): i
  modified_base (24): i
gtnccnytnkcngaratgttyggntaygc

SEQ ID NO: 1229 - DNA, 26 bp, Artificial Sequence
  Synthetic DNA Sequence
  modified_base (9): i
  modified_base (12): i
  modified_base (15): i
  modified_base (18): i
  modified_base (21): i
tccatytgngcngcnccngtnatcat

SEQ ID NO: 1230 - DNA, 2145 bp, Escherichia coli
tgaacgcctaaaagataaacgaggaaacaaatggctcgtacaacacccatcgcacgctaccgtaacatcggtatcagtgcgcacatcgacgccggtaaaaccactactaccgaacgtattctgttctacaccggtgtaaaccataaaatcggtgaagttcatgacggcgctgcaaccatggactggatggagcaggagcaggaacgtggtattaccatcacttccgctgcgactactgcattctggtctggtatggctaagcagtatgagccgcatcgcatcaacatcatcgacaccccggggcacgttgacttcacaatcgaagtagaacgttccatgcgtgttctcgatggtgcggtaatggtttactgcgcagttggtggtgttcagccgcagtctgaaaccgtatggcgtcaggcaaacaaatataaagttccgcgcattgcgttcgttaacaaaatggaccgcatgggtgcgaacttcctgaaagttgttaaccagatcaaaacccgtctgggcgcgaacccggttccgctgcagctggcgattggtgctgaagaacatttcaccggtgttgttgacctggtgaaaatgaaagctatcaactggaacgacgctgaccagggcgtaaccttcgaatacgaagatatcccggcagacatggttgaactggctaacgaatggcaccagaacctgatcgaatccgcagctgaagcttctgaagagctgatggaaaaatacctgggtggtgaagaactgactgaagcagaaatcaaaggtgctctgcgtcagcgcgttctgaacaacgaaatcatcctggtaacctgtggttctgcgttcaagaacaaaggtgttcaggcgatgctggatgcggtaattgattacctgccatccccggttgacgtacctgcgatcaacggtatcctggacgacggtaaagacactccggctgaacgtcacgcaagtgatgacgagccgttctctgcactggcgttcaaaatcgctaccgacccgtttgttggtaacctgaccttcttccgtgtttactccggtgtggttaactctggtgataccgtactgaactccgtgaaagctgcacgtgagcgtttcggtcgtatcgttcagatgcacgctaacaaacgtgaagagatcaaagaagttcgcgcgggcgacatcgctgctgctatcggtctgaaagacgtaaccactggtgacaccctgtgtgacccggatgcgccgatcattctggaacgtatggaattccctgagccggtaatctccatcgcagttgaaccgaaaaccaaagctgaccaggaaaaaatgggtctggctctgggccgtctggctaaagaagacccgtctttccgtgtatggactgacgaagaatctaaccagaccatcatcgcgggtatgggcgaactgcacctcgacatcatcgttgaccgtatgaagcgtgaattcaacgttgaagcgaacgtaggtaaaccgcaggttgcttaccgtgaaactatccgccagaaagttaccgatgttgaaggtaaacacgcgaaacagtctggtggtcgtggtcagtatggtcatgttgttatcgacatgtacccgctggagccgggttcaaacccgaaaggctacgagttcatcaacgacattaaaggtggtgtaatccctggcgaatacatcccggccgttgataaaggtatccaggaacagctgaaagcaggtccgctggcaggctacccggtagtagacatgggtattcgtctgcacttcggttcttaccatgacgttgactcctctgaactggcgtttaaactggctgcttctatcgcctttaaagaaggctttaagaaagcgaaaccagttctgcttgagccgatcatgaaggttgaagtagaaactccggaagagaacaccggtgacgttatcggtgacttgagccgtcgtcgtggtatgctcaaaggtcaggaatctgaagttactggcgttaagatccacgctgaagtaccgctgtctgaaatgttcggatacgcaactcagctgcgttctctgaccaaaggtcgtgcatcatacactatggaattcctgaagtatgatgaagcgccgagtaacgttgctcaggccgtaattgaagcccgtggtaaataa

SEQ ID NO: 1231 - DNA, 37 bp, Artificial Sequence
  Synthetic DNA Sequence
gcgagcccgaagataaaaaagaacctctgctgctcgc

SEQ ID NO: 1232 - DNA, 42 bp, Artificial Sequence
  Synthetic DNA Sequence
ggagccgcgcgattttataaatgaatgttgataaccggctcc

SEQ ID NO: 1233 - DNA, 35 bp, Artificial Sequence
  Synthetic DNA Sequence
gcgagcgttactggtgtagaaatgttccggctcgc

SEQ ID NO: 1234 - DNA, 20 bp, Artificial Sequence
  Synthetic DNA Sequence
actaaataaacgctcattcg

SEQ ID NO: 1235 - DNA, 38 bp, Artificial Sequence
  Synthetic DNA Sequence
gcgagccgaagttgaagttgttggtattgctggctcgc

SEQ ID NO: 1236 - DNA, 34 bp, Artificial Sequence
  Synthetic DNA Sequence
gcgagccgtggtgaagttcgcgttggtggctcgc

SEQ ID NO: 1237 - DNA, 38 bp, Artificial Sequence
  Synthetic DNA Sequence
gcgagccgcgaaatcgaagttgctgtattagggctcgc

SEQ ID NO: 1238 - DNA, 38 bp, Artificial Sequence
  Synthetic DNA Sequence
gcgagcggcgttaattttggcaccgaagaagagctcgc

SEQ ID NO: 1239 - DNA, 33 bp, Artificial Sequence
  Synthetic DNA Sequence
gcgagcgcagacctttcagcagaggaggctcgc

SEQ ID NO: 1240 - DNA, 38 bp, Artificial Sequence
  Synthetic DNA Sequence
gcgagccggcaagacaatatgacagcaaaatcgctcgc

SEQ ID NO: 1241 - DNA, 35 bp, Artificial Sequence
  Synthetic DNA Sequence
gcgagcggggaacgaggatgatttgattggctcgc

SEQ ID NO: 1242 - DNA, 600 bp, Enterococcus faecium
  strain BM4147-1
ttcttagagacattgaatatgccttatgtcggcgcaggcgtattgaccagtgcatgtgccatggataaaatcatgaccaagtatattttacaagctgctggtgtgccgcaagttccttatgtaccagtacttaagaatcaatggaaagaaaatcctaaaaaagtatttgatcaatgtgaaggttctttgctttatccgatgtttgtcaaacctgcgaatatgggttctagtgtcggcattacaaaggcagaaaaccgagaagagctgcaaaatgctttagcaacagcctatcagtatgattctcgagcaatcgttgaacaaggaattgaagcgcgcgaaatcgaagttgctgtattaggaaatgaagatgttcggacgactttgcctggcgaagtcgtaaaagacgtagcattctatgattatgaagccaaatatatcaataataaaatcgaaatgcagattccagccgaagtgccggaagaagtttatcaaaaagcgcaagagtacgcgaagttagcttacacgatgttaggtggaagcggattgagccggtgcgatttctttttgacaaataaaaatgaattattcctgaatgaatta

SEQ ID NO: 1243 - DNA, 2275 bp, Enterococcus faecalis
ggtaccaaagaaaaaaacgaacgccacaaccaacagcctctaaagcaacacctgcttctgaaattgagggagatttagcaaatgtcaatgagattcttttggttcacgatgatcgtgtcgggtcagcaacgatgggaatgaaagtcttagaagaaattttagataaagagaaaatttcaatgccgattcgaaaaattaatattaatgaattaactcaacaaacacaggctttaattgtcacaaaagctgaactaacggaacaagcacgtaaaaaagcaccgaaagcgacacacttatcagtaaaaagttatggttaatccccaaaaatatgaaacagtgggtttcgctcttaaaagaaagtgcctagagaggaagaaaacaatggaaaatcttacgaatatttcaattgaattaaatcaacagtttaatacaaaagaagaagctattcgcttttccggccagaaactagtcgaggcaggctgtgttgagcccgcttatatcgaagcaatgattgaaagagaccaattgctatctgcccatatggggaattttattgccattcctcatggaacagaagaagccaaaaaattagtgaaaaaatcaggaatctgtgtagtgcaagtcccagagggcgttaattttggcaccgaagaagatgaaaaaattgctaccgtattatttgggattgccggagtcggtgaagaacatttgcaattagtccaacaaattgcactttattgtagtgatatggataacgtggtgcaacttgccgatgcattaagtaaagaagaaataacagaaaatttagccattgcttaaaggagagaataagaatgaacgcagtacattttggagcaggaaatattggacgcggctttattggcgaaattttagctaaaacgggtttcatattaccgtttgtggatgttaatggaaaccatcatcaagcgttaaaagaacgtaaaagttatacaattgaattggccgatgcctcacatcaacaaattaacgttgaaaatgtgaccgggttaaataacatgacagaaccagaaaaagtagtagaagcaattgcggaagccgatttagtcacgacggcaattggtcctaatattttaccaagaattgctgaattaattgctcaaggaattgatgcacgtgccgaagcaaattgtcaaaacggcccgctggatattatcgcttgtgaaaatatgattggtggttcaacctttttagcagaagaagtggccataatatttgaaaaacccagcttatctgaacaatggattggttttcctgatgcggcagttgatcggattgttccattacaaaaacataaagatccactttttgttcaagttgagcctttttgtgaatgggtcattgatgataccaaccgaaaagccaaagagattcagttagaaggcgtcattacttgtcgattagagccgtatattgaacgaaaattatttagtgtaaccagtggccatgctacagttgcctatacaggggcgttgttaggctatcaaaccattgacgaagcgatgcaggacgccttagtggtagcgcaactcaaatcagttttgcaggaaaccggtaaacttttagtggccaaatggaattttgatgaacaagaacatgcagcctatattgaaaaaattatcaaccgtttccaaaataaatatatttcagatgctattacacgtgtagcacggacaccaatcagaaaattaggtgcgcaagaacggtttattcgaccaatccgtgaattacaggaacgcaatctagtgtcggccgcatttatagcaatgattggtattgtctttaattatcatgatccagaagatgaacaaagccgtcaattacaggaaatgcttgaccaagaaagtgttgatacagtggatcgctgaagtaacgggcattgaagatccagaaacggttaaaaatattaaacaaaacgtagaactgctatgcgcgaccacaagtagcataattaacaaaatccttctaccaagatacttcacatttcttaattaaagaaaaaacaaccgcgcctcacctgagccgacccccaaaagttagacctagaaatctaacttttggaggtttttttgtatggcaaaatacagttttgaaatttaaacttaaacttgttcatgactacttatatggtcaaggaggtctaaggtttctcgcaaagaagtatgggtttaaagatagtctcaaataagcaaatggataaatgcctataaagaacttggtgaagaaggggggatcc

SEQ ID NO: 1244 - DNA, 442 bp, Staphylococcus aureus subsp. aureus
  ref <308>: DATABASE ACCESSION NUMBER: ATCC 25923
gatcaatctttgtcggtacacgatattcttcacgactaaataaacgctcattcgcgattttataaatgaatgttgataacaatgttgtattatctactgaaatctcattacgttgcatcggaaacattgtgttctgtatgtaaaagccgtcttgataatctttagtagtaccgaagctggtcatacgagagttatattttccagccaaaacgatatttttataatcattacgtgaaaaaggtttcccttcattatcacacaaatattttagcttttcagtttctatatcaactgtagcttctttatccatacgttgaataattgtacgattctgacgcaccatcttttgcacacctttaatgttatttgttttaaaagcatgaataagtttttcaacacaacgatgtgaatcttctaagaagtcaccgtaaaatgaaggatc

SEQ ID NO: 1245 - DNA, 845 bp, Bacillus anthracis
  strain CIP 9444
gatggcggaaagctaccagaaatctacaacgcccttacggtaaaacagagcaacgaaaacggaacaagcattaacttaacatttgaagttgcacttcatttaggtgatgacacagttcgtacagttgcaatgtcttccacagatggacttgttcgtggcacagaagtagaagatactggtaaagcaatctctgtaccagttggtgatgcaacacttggtcgtgtatttaacgtattaggtgatgcaattgacttagatggtgaggttcctgcggatgtacgtcgtgatccaattcaccgtcaagcacctgcattcgaagaattatctactaaagtagaaattcttgaaactggtattaaagtagtagacttacttgctccttacattaagggtggtaagatcggtctattcggtggtgccggtgtaggtaaaacggtattaattcaggaattaatcaataacatcgcacaagaacacggtggtatctctgtattcgctggtgtaggtgagcgtactcgtgagggtaatgacttataccacgaaatgagcgattctggcgtaattaagaaaactgcgatggtattcggacaaatgaacgagccacctggagcacgtcaacgtgttgcgttaacaggtttaacaatggctgagcatttccgtgatgagcaaggacaagatgtacttctgttcatcgataatatcttccgtttcacgcaagcaggttctgaagtatctgcccttcttggccgtatgccatctgcggtaggttaccaaccaacacttgcaacagaaatgggtcaattacaagagcgtattacatctacaaataaagggtctatcacgtc

SEQ ID NO: 1246 - DNA, 656 bp, Bacillus mycoides
  ref <308>: DATABASE ACCESSION NUMBER: ATCC 11986
tgcacttcatttaggtgatgacacagttcgtacagttgcaatgtcttccacagatggacttgttcgtggcacagaagtagaagatactggtaaagcaatctctgtaccagttggtgatgtaacacttggtcgtgtatttaacgtattaggtgatgcaattgacttagatggtgatgttcctgcggatgtacgtcgtgatccaattcaccgtcaagcgcctgcattcgaagagttatctactaaagtagaaattcttgaaactggtattaaagtagtagacttacttgctccttacattaagggtggtaagattggtctattcggtggtgccggcgtaggtaaaacagtattaattcaggaattaattaataacatcgcacaagagcacggtggtatctctgtattcgctggtgtaggtgagcgtactcgtgaaggtaacgacttataccacgaaatgagcgattctggcgtaattaagaaaactgcgatggtattcggacaaatgaacgagccacctggagcacgtcaacgtgttgcattaacaggtttaacaatggctgaacatttccgtgatgagcaaggacaagacgtactattgttcatcgataacatcttccgtttcacgcaagcgggttctgaagtatctgcccttcttg

SEQ ID NO: 1247 - DNA, 791 bp, Bacillus thuringiensis
  ref <308>: DATABASE ACCESSION NUMBER: ATCC 10792
cgaaaacggaagtattaacttaacatttgaagttgcacttcatttaggtgatgatacagttcgtacagttgcgatgtcttccacagatggacttgttcgtggcacagaagtagaagatactggtaaaccaatctctgtaccagttggtgatgtaacacttggtcgcgtatttaacgtattaggtgatgcaattgacttagatggtgaggttcctgcagatgtacatcgtgatccaattcaccgtcaagcacctgcattcgaagaattatctactaaagtagaaattcttgaaactggtattaaagtagtagacttacttgctccttacattaagggtggtaagatcggcctattcggtggtgccggcgtaggtaaaacagtattaattcaggaattaattaacaacatcgcacaagagcacggtggtatctctgtattcgctggtgtaggtgagcgtactcgtgagggtaatgacttataccacgaaatgagcgattctggcgtaatcaagaaaactgcgatggtattcggacaaatgaacgagccacctggagcacgtcaacgtgttgcattaacaggtttaacaatggctgagcatttccgtgatgagcaaggacaagacgtacttctgttcatcgataacatcttccgtttcacgcaagcgggttctgaagtatctgcccttcttggtcgtatgccatctgcggtaggttaccaaccaacacttgcaacagaaatgggtcaattacaagagcgtattacatctacaaataaagggtctatcacgtcta

SEQ ID NO: 1248 - DNA, 825 bp, Bacillus thuringiensis
  strain BGSC 4AC1
atctacaatgcccttacggtaaaacaaagcaacgaaaacggaagcatgaacttaacatttgaagttgcacttcatttaggtgatgatacagttcgtacagttgcgatgtcttccacagatggacttgttcgtggcacagaagtagaagatactggtaaagcaatctctgtaccagttggtgatgcaacacttggacgtgtattcaacgtattaggtgatgcaattgacttagatggtgaacttcctgcggatgtacaccgtgatccaattcaccgtcaagcacctgcattcgaagaattatctactaaagtagaaattcttgaaactggtattaaagtagtagacttacttgctccttacattaagggtggtaagatcggcctattcggtggtgccggcgtaggtaaaacagtattaattcaggagttaatcaataacatcgcacaagagcacggtggtatctctgtattcgctggtgtaggtgagcgtactcgtgagggtaatgacttataccacgaaatgagcgattctggcgtaatcaagaaaactgcgatggtattcggacaaatgaacgagccacctggagcacgtcaacgtgttgcattaacaggtttaacaatggctgagcatttccgtgatgagcaaggacaagacgtacttctgttcatcgataacatcttccgtttcacgcaagcgggttctgaagtatctgcccttcttggtcgtatgccatctgcggtaggttaccaaccaacacttgcaacagaaatgggtcaattacaagagcgtattacatctacaaataaagggtctatcacgtctatc

SEQ ID NO: 1249 - DNA, 775 bp, Bacillus thuringiensis
  strain HER 1236
atctacaacgcccttacggtaaaacaaagcaacgaaaacggaagtattaacttaacatttgaagttgcacttcatttaggtgatgatacagttcgtacagttgcgatgtcttccacagatggacttgttcgtggcacagaagtagaagatactggtaaaccaatctctgtaccagttggtgatgtaacacttggtcgcgtatttaacgtattaggtgatgcaattgacttagatggtgaggttcctgcagatgtacatcgtgatccaattcaccgtcaagcacctgcattcgaagaattatctactaaagtagaaattcttgaaactggtattaaagtagtagacttacttgctccttacattaagggtggtaagatcggcctattcggtggtgccggcgtaggtaaaacagtattaattcaggaattaattaacaacatcgcacaagagcacggtggtatctctgtattcgctggtgtaggtgagcgtactcgtgagggtaatgacttataccacgaaatgagcgattctggcgtaatcaagaaaactgcgatggtattcggacaaatgaacgagccacctggagcacgtcaacgtgttgcattaacaggtttaacaatggctgagcatttccgtgatgagcaaggacaagacgtacttctgttcatcgataacatcttccgtttcacgcaagcgggttctgaagtatctgcccttcttggtcgtatgccatctgcggtaggttaccaaccaacacttgcaacagaaatgggtc

SEQ ID NO: 1250 - DNA, 832 bp, Bacillus weihenstephanensis
  strain WSBC 10204
ccagcaatctacaacgcccttacggtaaaacaaagcaacgaaaacggagcgagcatcaacttaacatttgaagttgcacttcatttaggtgatgacacagttcgtacagttgcgatgtcttccacagatggacttgttcgtggcacagaagtagaagatactggtaaagcaatctctgtaccagttggtgatgtaacacttggtcgcgtattcaacgtattaggtgatgcaattgacttagatggtgatgttcctgcggatgtacgtcgtgatccaattcaccgtcaagcacctgcattcgaagaactatctacaagaatagaaattcttgaaactggtattaaagtagtagatttacttgctccttacattaagggtggtaagatcggtctattcggtggtgccggtgtaggtaaaacggtattaattcaggaattaattaacaacatcgcacaagagcacggtggtatctctgtattcgctggtgtaggtgagcgtactcgtgagggtaatgacttataccacgaaatgagcgattctggcgtaattaagaaaactgcgatggtatttggacaaatgaacgagccacctggagcacgtcaacgtgttgcattaacaggtttaacaatggctgaacatttccgtgatgagcaaggacaagacgtactattgttcatcgataacatcttccgtttcacgcaagcaggttctgaagtatctgcccttcttggtcgtatgccatctgcggtaggttaccaaccaacacttgcaacagaaatgggtcaattacaagagcgtattacatctacaaataaagggtctatcacgtcta

SEQ ID NO: 1251 - DNA, 802 bp, Bacillus thuringiensis
  strain HER 1418
aaatctacaacgcccttacggtaaaacaaagcaacgaaaacggaagtattaacttaacatttgaagttgcacttcatttaggtgatgatacagttcgtacagttgcgatgtcttccacagatggacttgttcgtggcacagaagtagaagatactggtaaaccaatctctgtaccagttggtgatgtaacacttggtcgcgtatttaacgtattaggtgatgcaattgacttagatggtgaggttcctgcagatgtacatcgtgatccaattcaccgtcaagcacctgcattcgaagaattatctactaaagtagaaattcttgaaactggtattaaagtagtagacttacttgctccttacattaagggtggtaagatcggcctattcggtggtgccggcgtaggtaaaacagtattaattcaggaattaattaacaacatcgcacaagagcacggtggtatctctgtattcgctggtgtaggtgagcgtactcgtgagggtaatgacttataccacgaaatgagcgattctggcgtaatcaagaaaactgcgatggtattcggacaaatgaacgagccacctggagcacgtcaacgtgttgcattaacaggtttaacaatggctgagcatttccgtgatgagcaaggacaagacgtacttctgttcatcgataacatcttccgtttcacgcaagcgggttctgaagtatctgcccttcttggtcgtatgccatctgcggtaggttaccaaccaacacttgcaacagaaatgggtcaattacaagagcgtattacatctac

SEQ ID NO: 1252 - DNA, 823 bp, Bacillus thuringiensis
  strain HER 1410
aaatctacaacgcccttacggtaaaacaaagcaacgaaaacggaagtattaacttaacatttgaagttgcacttcatttaggtgatgatacagttcgtacagttgcaatgtcttccacagatggacttgttcgtggcacagaagtagaagatactggtaaaccaatctctgtaccagttggtgatgtaacacttggtcgcgtatttaacgtattaggtgatgcaattgacttagatggtgaggttcctgcagatgtacatcgtgatccaattcaccgtcaagcacctgcattcgaagaattatctactaaagtagaaattcttgaaactggtattaaagtagtagacttacttgctccttacattaagggtggtaagatcggcctattcggtggtgccggcgtaggtaaaacagtattaattcaggaattaattaacaacatcgcacaagagcacggtggtatctctgtattcgctggtgtaggtgagcgtactcgtgagggtaatgacttataccacgaaatgagcgattctggcgtaatcaagaaaactgcgatggtattcggacaaatgaacgagccacctggagcacgtcaacgtgttgcattaacaggcttaacaatggctgagcatttccgtgatgagcaaggacaagacgtacttctgttcatcgataacatcttccgtttcacgcaagcgggttctgaagtatctgcccttcttggtcgtatgccatctgcggtaggttaccaaccaacacttgcaacagaaatgggtcaattacaagagcgtattacatctacaaataaagggtctatcacgtc

SEQ ID NO: 1253 - DNA, 798 bp, Bacillus cereus
  ref <308>: DATABASE ACCESSION NUMBER: ATCC 13472
ccagaaatctacaatgcccttacggtaaaacaaagcaacgaaaacggaagcatgaacttaacatttgaagttgcacttcatttaggtgatgatacagttcgtacagttgcgatgtcttccacagatggacttgttcgtggcacagaagtagaagatactggtaaagcaatctctgtaccagttggtgatgcaacacttggacgtgtattcaacgtattaggtgatgcaattgacttagatggtgaacttcctgcggatgtacaccgtgatccaattcaccgtcaagcacctgcattcgaagaattatctactaaagtagaaattcttgaaactggtattaaagtagtagacttacttgctccttacattaagggtggtaagatcggcctattcggtggtgccggcgtaggtaaaacagtattaattcaggaattaatcaataacatcgcacaagagcatggtggtatctctgtattcgctggtgtaggtgagcgtactcgtgagggtaatgacttataccacgaaatgagcgattctggcgtaatcaagaaaactgcgatggtattcggacaaatgaacgagccacctggagcacgtcaacgtgttgcattaacaggtttaacaatggctgagcatttccgtgatgagcaaggacaagacgtacttctgttcatcgataacatcttccgtttcacgcaagcgggttctgaagtatctgcccttcttggtcgtatgccatctgcggtaggttaccaaccgacacttgcaacagaaatgggtcaattacaagagcgtatt

SEQ ID NO: 1254 - DNA, 767 bp, Bacillus cereus
  ref <308>: DATABASE ACCESSION NUMBER: ATCC 7064
catttgaagttgcacttcatttaggtgatgacacagttcgtacagttgcaatgtcttccacagatggacttgttcgtggcacagaagtagaagatactggtaaagcaatctctgtaccagttggtgatgcaacacttggtcgtgtatttaacgtattaggtgatgcaattgacttagatggtgaggttcctgcggatgtacgtcgtgatccaattcaccgtcaagcacctgcattcgaagaattatctactaaagtagaaattcttgaaactggtattaaagtagtagacttacttgctccttacattaagggtggtaagatcggtctattcggtggtgccggtgtaggtaaaacggtattaattcaggaattaatcaataacatcgcacaagaacacggtggtatctctgtattcgctggtgtaggtgagcgtactcgtgagggtaatgacttataccacgaaatgagcgattctggcgtaattaagaaaactgcgatggtattcggacaaatgaacgagccacctggagcacgtcaacgtgttgcgttaacaggtttaacaatggctgagcatttccgtgatgagcaaggacaagacgtacttctgttcatcgataatatcttccgtttcacgcaagcaggttctgaagtatctgcccttcttggccgtatgccatctgcggtaggttaccaaccaacacttgcaacagaaatgggtcaattacaagagcgtattacatctacaaataaagggtctatcacgtct

SEQ ID NO: 1255 - DNA, 1174 bp, Staphylococcus aureus
  strain C-14
  misc_feature (1)...(1174): n=a,t,c or g
gaaatgcgtgaatcatttttagattatgcgatgagtgttatcgttgctcgtgcattgccagatgttcgtgacggtttaaaaccagtacatcgtcgtatactatatggattaaatgaacaaggtatgacaccggataaatcatataaaaaatcagcacgtatcgttggtgacgtaatgggtaaatatcaccctcatggtgacttatctatttatgaagcaatggtacgtatggctcaagatttcagttatcgttatccgcttgttgatggccaaggtaactttggttcaatggatggagatggcgcagcagcaatgcgttatactgaagcgcgtatgactaaaatcacacttgaactgttacgtgatattaataaagatacaatagattttatcgataactatgatggtaatgaaagagagccgtcagtcttacctgctcgattccctaacttattagccaatggtgcatcaggtatcgcggtaggtatggcaacgaatattccaccacataacttaacagaattaatcaatggtgtacttagcttaagtaagaaccctgatatttcaattgctgagttaatggaggatattgaaggtcctgatttcccaactgctggacttattttaggtaagagtggtattagacgtgcatatgaaacaggtcgtggttcaattcaaatgcgttctcgtgcagttattgaagaacgtggagncggacgtcaacgtattgttgtcactgaaattcctttccaagtgaataaggctcgtatgattgaaaaaattgcagagctcgttcgtgacaagaaaattgacggtatcactgatttacgtgatgaaacaagtttacgtactggtgtgcgtgtcgttattgatgtgcgtaaggatgcaaatgctagtgtcattttaaataacttatacaaacaaacacctcttcaaacatcatttggtgtgaatatgattgcacttgtaaatggtagaccgaagcttattaatttaaaagaagcgttggtacattatttagagcatcaaaagacagttgttagaagacgtacgcaatacaacttacgtaaagctaaagatcgtgcccacattttagaaggattacgtatcgcacttgaccatatcgatgaaattatttcaacgattcgtgagtcagatacagataaagttgcaa

SEQ ID NO: 1256 - DNA, 780 bp, Bacillus weihenstephanensis
  strain WSBC 10209
atctacaacgcccttacggtaaaacaaagcaacgaaaacggagcaagcattaacttaacatttgaagttgcacttcatttaggtgatgacacagttcgtacagttgcaatgtcttccacagatggacttgttcgtggcacagaagtagaagatactggtaaagcaatctctgtaccagttggtgatgtaacacttggtcgtgtatttaacgtattaggtgatgcaattgacttagatggagatgttcctgcggatgtacgtcgtgatccaattcaccgtcaagcgcctgcattcgaagagttatctactaaagtagaaattcttgaaactggtattaaagtagtagacttacttgctccttacattaagggtggtaagatcggtctattcggtggtgccggtgtaggtaaaacagtattaattcaggaattaattaacaacatcgcacaagagcacggtggtatctctgtattcgctggtgtaggtgagcgtactcgtgaaggtaacgacttataccacgaaatgagcgattctggcgtaattaagaaaactgcgatggtattcggacaaatgaacgagccacctggagcacgtcaacgtgttgcattaacaggtttaacaatggctgaacatttccgtgatgagcaagggcaagacgtactattgttcatcgataacatcttccgtttcacgcaagcgggttctgaagtatctgcccttcttggtcgtatgccatctgcggtaggttaccagccaacacttgcaacagaaatgggtcaa

SEQ ID NO: 1257 - DNA, 817 bp, Bacillus anthracis
  strain CIP 7700
ctaccagaaatctacaacgcccttacggtaaaacagagcaacgaaaacggaacaagcattaacttaacatttgaagttgcacttcatttaggtgatgacacagttcgtacagttgcaatgtcttccacagatggacttgttcgtggcacagaagtagaagatactggtaaagcaatctctgtaccagttggtgatgcaacacttggtcgtgtatttaacgtattaggtgatgcaattgacttagatggtgaggttcctgcggatgtacgtcgtgatccaattcaccgtcaagcacctgcattcgaagaattatctactaaagtagaaattcttgaaactggtattaaagtagtagacttacttgctccttacattaagggtggtaagatcggtctattcggtggtgccggtgtaggtaaaacggtattaattcaggaattaatcaataacatcgcacaagaacacggtggtatctctgtattcgctggtgtaggtgagcgtactcgtgagggtaatgacttataccacgaaatgagcgattctggcgtaattaagaaaactgcgatggtattcggacaaatgaacgagccacctggagcacgtcaacgtgttgcgttaacaggtttaacaatggctgagcatttccgtgatgagcaaggacaagatgtacttctgttcatcgataatatcttccgtttcacgcaagcaggttctgaagtatctgcccttcttggccgtatgccatctgcggtaggttaccaaccaacacttgcaacagaaatgggtcaattacaagagcgtattacatctacaaata

SEQ ID NO: 1258 - DNA, 829 bp, Bacillus thuringiensis
  strain HER 1404
ccagaaatctacaacgcccttacggtaaaacaaagcaacgaaaacggaagtattaacttaacatttgaagttgcacttcatttaggtgatgatacagttcgtacagttgcgatgtcttccacagatggacttgttcgtggcacagaagtagaagatactggtaaaccaatctctgtaccagttggtgatgtaacacttggtcgcgtatttaacgtattaggtgatgcaattgacttagatggtgaggttcctgcagatgtacatcgtgatccaattcaccgtcaagcacctgcattcgaagaattatctactaaagtagaaattcttgaaactggtattaaagtagtagacttacttgctccttacattaagggtggtaagatcggcctattcggtggtgccggcgtaggtaaaacagtattaattcaggaattaattaacaacatcgcacaagagcacggtggtatctctgtattcgctggtgtaggtgagcgtactcgtgagggtaatgacttataccacgaaatgagcgattctggcgtaatcaagaaaactgcgatggtattcggacaaatgaacgagccacctggagcacgtcaacgtgttgcattaacaggtttaacaatggctgagcatttccgtgatgagcaaggacaagacgtacttctgttcatcgataacatcttccgtttcacgcaagcgggttctgaagtatctgcccttcttggtcgtatgccatctgcggtaggttaccaaccaacacttgcaacagaaatgggtcaattacaagagcgtattacatctacaaataaagggtctatcacgtcta

SEQ ID NO: 1259 - DNA, 844 bp, Bacillus cereus
  ref <308>: DATABASE ACCESSION NUMBER: ATCC 15816
tggcggaaagctaccagaaatctacaacgcccttacggtaaaacagagcaacgaaaacggtgaacttaacttaacatttgaagttgcacttcatttaggtgatgatacagttcgtacagttgcgatgtcttccacagatggacttgttcgtggcacagaagtagaagatactggtaaagcaatctctgtaccagttggtgatgcaacacttggtcgcgtatttaacgtattaggtgatgctattgacttagatggtgaggttcctgcggatgtacgtcgtgatccaattcaccgtcaagcacctgcattcgaagaattatctactaaagtagaaattcttgaaactggtattaaagtagtagacttacttgctccttacattaagggtggtaagatcggcctattcggtggtgccggtgtaggtaaaacagtattaattcaggagttaatcaacaacatcgcacaagagcacggtggtatctctgtattcgctggtgtaggtgagcgtactcgtgagggtaatgacttataccacgaaatgagcgattctggcgtaattaagaaaactgcgatggtattcggacaaatgaacgagccacctggagcacgtcaacgtgttgcattaacaggcttaacaatggctgaatatttccgtgatgagcaaggacaagacgtacttctgttcatcgataatatcttccgtttcacgcaagcaggttctgaagtatctgcccttcttggccgtatgccatctgcggtaggttaccaaccaacacttgcaacagaaatgggtcaattacaagagcgtattacatctacaaataaagggtctatcacgtctatc

SEQ ID NO: 1260 - DNA, 840 bp, Bacillus cereus
  ref <308>: DATABASE ACCESSION NUMBER: ATCC 49064
aagctaccagaaatctacaacgcccttacggtaaaacagagcaacgaaaacggaacaagcattaacttaacatttgaagttgcacttcatttaggtgatgacacagttcgtacagttgcaatgtcttccacagatggacttgttcgtggcacagaagtagaagatactggtaaagcaatctctgtaccagttggtgatgcaacacttggtcgtgtatttaacgtattaggtgatgcaattgacttagatggtgaggttcctgcggatgtacgccgtgatccaattcaccgtcaagcacctgcattcgaagaattatctactaaagtagaaattcttgaaactggtattaaagtagtagacttacttgctccttacattaagggtggtaagatcggtctattcggtggtgccggtgtaggtaaaacagtattaattcaggaattaatcaacaacatcgcacaagaacacggtggtatctctgtattcgctggtgtaggtgagcgtactcgtgagggtaatgacttataccacgaaatgagcgattcaggcgtaattaagaaaactgcgatggtattcggacaaatgaacgagccacctggagcgcgtcaacgtgttgcgttaacaggtttaacaatggctgagcatttccgtgatgagcaaggacaagacgttcttctgttcatcgataatatcttccgtttcacgcaagcaggttctgaagtatctgcccttcttggtcgtatgccatctgcggtaggttaccaaccaacacttgcaacagaaatgggtcaattacaagagcgtattacatctacaaataaagggtctatcacgtctatc

SEQ ID NO: 1261 - DNA, 839 bp, Bacillus thuringiensis
  strain BGSC 4AZ1
gcggaaagctaccagaaatctacaatgcccttacggtaaaacaaagcaacgaaaacggaagcatgaacttaacatttgaagttgcacttcatttaggtgatgatacagttcgtacagttgcgatgtcttccacagatggacttgttcgtggcacagaagtagaagatactggtaaagcaatctctgtaccagttggtgatgcaacacttggacgtgtattcaacgtattaggtgatgcaattgacttagatggtgaacttcctgcggatgtacaccgtgatccaattcaccgtcaagcacctgcattcgaagaattatctactaaagtagaaattcttgaaactggtattaaagtagtagacttacttgctccttacattaagggtggtaagatcggcctattcggtggtgccggcgtaggtaaaacagtattaattcaggagttaatcaataacatcgcacaagagcacggtggtatctctgtattcgctggtgtaggtgagcgtactcgtgagggtaatgacttataccacgaaatgagcgattctggcgtaatcaagaaaactgcgatggtattcggacaaatgaacgagccacctggagcacgtcaacgtgttgcattaacaggtttaacaatggctgagcatttccgtgatgagcaaggacaagacgtacttctgttcatcgataacatcttccgtttcacgcaagcgggttctgaagtatctgcccttcttggtcgtatgccatctgcggtaggttaccaaccaacacttgcaacagaaatgggtcaattacaagagcgtattacatctacaaataaagggtctatcacgtct

SEQ ID NO: 1262 - DNA, 833 bp, Bacillus thuringiensis
  strain BGSC 4H2
aagctaccagaaatctacaatgcccttacggtaaaacaaagcaacgaaaacggaagcatgaacttaacatttgaagttgcacttcatttaggtgatgatacagttcgtacagttgcgatgtcttccacagatggacttgttcgtggcacagaagtagaagatactggtaaagcaatctctgtaccagttggtgatgcaacacttggacgtgtattcaacgtattaggtgatgcaattgacttagatggtgaacttcctgcggatgtacaccgtgatccaattcaccgtcaagcacctgcattcgaagaattatctactaaagtagaaattcttgaaactggtattaaagtagtagacttacttgctccttacattaagggtggtaagatcggcctattcggtggtgccggcgtaggtaaaacagtattaattcaggaattaatcaataacatcgcacaagagcacggtggtatctctgtattcgctggtgtaggtgagcgtactcgtgagggtaatgacttataccacgaaatgagcgattctggcgtaatcaagaaaactgcgatggtattcggacaaatgaacgagccacctggagcacgtcaacgtgttgcattaacaggtttaacaatggctgagcatttccgtgatgagcaaggacaagacgtacttctgttcatcgataacatcttccgtttcacgcaagcgggttctgaagtatctgcccttcttggtcgtatgccatctgcggtaggttaccaaccaacacttgcaacagaaatgggtcaattacaagagcgtattacatctacaaataaagggtctatcacgtc

SEQ ID NO: 1263 - DNA, 790 bp, Bacillus thuringiensis
  strain BGSC 4Q1
cgaaaacggaagcatgaacttaacatttgaagttgcacttcatttaggtgatgatacagttcgtacagttgcgatgtcttccacagatggacttgttcgtggcacagaagtagaagatactggtaaagcaatttctgtaccagttggtgatgtaacacttggacgtgtattcaacgtattaggtgatgcaattgacttagatggtgaacttcctgcggatgtacaccgtgatccaattcaccgtcaagcacctgcattcgaagaattatctactaaagtagaaattcttgaaactggtattaaagtagtagacttacttgctccttacattaagggtggtaagatcggcctattcggtggtgccggtgtaggtaaaacagtattaattcaggaattaattaacaacatcgcacaagagcacggtggtatctctgtattcgctggtgtaggtgagcgtactcgtgagggtaatgacttataccacgaaatgagcgattctggcgtaatcaagaaaactgcgatggtattcggacaaatgaacgagccacctggagcacgtcaacgtgttgcattaacaggtttaacaatggctgagcatttccgtgatgagcaaggacaagacgtacttctgttcatcgataacatcttccgtttcacgcaagcgggttctgaagtatctgcccttcttggtcgtatgccatctgcggtaggttaccaaccaacacttgcaacagaaatgggtcaattacaagagcgtattacatctacaaataaagggtctatcacgtct

SEQ ID NO: 1264 - DNA, 644 bp, Bacillus thuringiensis
  strain HER 1232
agttgcacttcatttaggtgatgatacagttcgtacagttgcgatgtcttccacagatggacttgttcgtggcacagaagtagaagatactggtaaaccaatctctgtaccagttggtgatgtaacacttggtcgcgtatttaacgtattaggtgatgcaattgacttagatggtgaggttcctgcagatgtacatcgtgatccaattcaccgtcaagcacctgcattcgaagaattatctactaaagtagaaattcttgaaactggtattaaagtagtagacttacttgctccttacattaagggtggtaagatcggcctattcggtggtgccggcgtaggtaaaacagtattaattcaggaattaattaacaacatcgcacaagagcacggtggtatctctgtattcgctggtgtaggtgagcgtactcgtgagggtaatgacttataccacgaaatgagcgattctggcgtaatcaagaaaactgcgatggtattcggacaaatgaacgagccacctggagcacgtcaacgtgttgcattaacaggtttaacaatggctgagcatttccgtgatgagcaaggacaagacgtacttctgttcatcgataacatcttccgtttcacgcaagcgggttctgaag

SEQ ID NO: 1265 - DNA, 823 bp, Bacillus anthracis
  ref <308>: DATABASE ACCESSION NUMBER: ATCC 4229
ggcggaaagctaccagaaatctacaacgcccttacggtaaaacagagcaacgaaaacggaacaagcattaacttaacatttgaagttgcacttcatttaggtgatgacacagttcgtacagttgcaatgtcttccacagatggacttgttcgtggcacagaagtagaagatactggtaaagcaatctctgtaccagttggtgatgcaacacttggtcgtgtatttaacgtattaggtgatgcaattgacttagatggtgaggttcctgcggatgtacgtcgtgatccaattcaccgtcaagcacctgcattcgaagaattatctactaaagtagaaattcttgaaactggtattaaagtagtagacttacttgctccttacattaagggtggtaagatcggtctattcggtggtgccggtgtaggtaaaacggtattaattcaggaattaatcaataacatcgcacaagaacacggtggtatctctgtattcgctggtgtaggtgagcgtactcgtgagggtaatgacttataccacgaaatgagcgattctggcgtaattaagaaaactgcgatggtattcggacaaatgaacgagccacctggagcacgtcaacgtgttgcgttaacaggtttaacaatggctgagcatttccgtgatgagcaaggacaagatgtacttctgttcatcgataatatcttccgtttcacgcaagcaggttctgaagtatctgcccttcttggccgtatgccatctgcggtaggttaccaaccaacacttgcaacagaaatgggtcaattacaagagcgtattacatctacaa

SEQ ID NO: 1266 - DNA, 715 bp, Paracoccidioides brasiliensis
  ref <308>: DATABASE ACCESSION NUMBER: ATCC 200443
tggtccgagrcccgattcmatgaaattatcaaggaaacctccaayttcattaagaaggtcggatataaccccaagactgttcctttcgttcccatttctggtttccagggtgacaacatgatcgatscctctgccaactgcccatggtacaagggctggtacmakgagactgccgacaggcaagyactctggcaagacccttcttgaggccattgacgscattgagccccccamscgtcctwccgataaacctctccgtcttcctctccaggatgtctacaagatctccggtattggmactgttcctgtcggacgtrttgagactggagtcatcaagcccggtatggtcgtgaccttcgctcccgccaacgtcaccactgaagtcaagtccgttgaaatgcaccaccagcagctttccgacggtawccccggtgacaacgtcggcttcaacgtcaagaatgtttccgtcaaagaagtccgccgtggtaacgttgcctggtgactctaagaatgatcccgcmawgggctgcgattccttcaatgcycaggtcatcgtcctcaaccaccctggtcaggttggcgctggttatgccccagtcctcgaytgccatactgcccacattgcytgcaarttcgctgagmtcmakgagaagattgaycgccgaaccggmaagtctgttgagaacgcccccaagttcatcaagtccggtgatgc

SEQ ID NO: 1267 - DNA, 875 bp, Blastomyces dermatitidis
  ref <308>: DATABASE ACCESSION NUMBER: ATCC 56220
gagtcctcttatttacttttgtcatgactaccttactaatctgtcatagatcgttacaacgaaatcgtcaaggagacttccaacttcatcaagaaggtcggatacaaccccaagaacgttcctttcgttcctatctccggtttcaacggcgacaacatgcttgagccctcccccaactgcccctggtacaagggttgggagaaggagaccaaggccggtaaggtcactggtaagaccctcctcgaggccatcgacgccattgagccccctacccgtcccgccaacaaggtcagtactacctcaattacttgaactctcttcatacgttccgattactgactgcttcacagcccctccgtcttcccctccaggacgtttacaagatcggtggtattggaacggtgcccgtcggtcgtgttgagaccggtaccatctcccctggtatggtcgttaccttgtatgtatcctgaccatcccccttggcaatcattacgtactaactcactcttcagcgctcccgccaacgtcaccactgaagtcaagagtgttgaaatgcaccaccagcagctcgctgccggtcagcccggtgacaacgttggtttcaacgtgaagaacgtctccgtcaaggaaatccgtcgtggtaacgttgctggtgatagcaagaacgacccccctgccggtgctgcttccttcaacgcccaggtcatcgtcctcaaccaccccggtcaggtcggtgctggttacgccccagtccttgactgccacactgcccacattgcttgcaagttctctgaactccttgagaagattgaccgtcgtaccggaaagtctgttgaggaccaccccaagttcatcaagtccggtgacgctgccat

SEQ ID NO: 1268 - DNA, 1124 bp, Histoplasma capsulatum
  strain WSA-377
gtgagcgtggtatcaccatcgatattgccctctggaaattcgagaccccgaagtacagtgtcactgtcattggtgagtgctttttacccctcttaagcagatttcaacttccagagtatctactctaacatatccgcttagatgctcccggccatcgtgacttcatcaagaacatgatcactggtacctcccaggctgactgcgctatcctcatcattgctgccggtactggtgagttcgaggctggtatctccaaggatggccagactcgtgagcacgctctgcttgctttcacccttggtgtgaggcaactcatcgttgccatcaacaagatggacaccaccaagtggtccgagtcccgtttcaacgaaatcatcaaggaggtttccaacttcatcaagaaggtcggatataaccccaaggctgttcccttcgtgccaatctctggtttcgagggtgacaacatgattgaaccctcccccaactgcacctggtacaagggctggaacaaggagactgcctctggcaagtcttctggtaaaacccttctcgatgccattgacgccattgaacccccaacccgtcctaccgataagcctctccgtcttcccctccaggatgtttacaaaatctctggtattggcactgttcccgtcggacgtgttgagactggtgtcatcaagcccggtatggtcgtgactttcgctccctccaacgtcaccactgaagtcaagtccgtcgagatgcaccaccaacaactccaggctggttaccctggtgacaacgtcggcttcaacgtcaagaacgtttcagtcaaggaagtccgccgtggcaacgttgctggcgactccaaaaatgatccccccaagggctgcgaatccttcaatgcccaggtcatcgtccttaaccaccccggccaggttggcgctggttatgccccagtcctcgactgccacactgcccacattgcttgcaagttctctgaactcattgagaagatcgaccgccgtactggaaagtctgttgagaacaaccccaagttcatcaagtctggtgatgctgctatcgtcaagatggttccctccaagcccatgtgcgtggagcccttcactgactatccccct

SEQ ID NO: 1269 - DNA, 1043 bp, Trichophyton rubrum
  strain WSA-224
  misc_feature (1)...(1043): n=a,t,c or g
gtgagcgtggtatcaccatcgatatcgccctctggaagttcgagacccccaagtacaatgtcaccgtcattggtatgtttctttgccttgttccctcatgtggttgtaccatatctaacgagagtagacgcccccggtcaccgtgacttcatcaagaacatgatcactggtacctcccaggctgactgcgctattctcatcattgctgccggtactggtgagttcgaggctggtatctccaaggatggccagacccgtgagcacgctctgctcgccttcaccctcggtgtcaagcagctcatcgttgccatcaacaagatggacaccaccggctggtccgaggatcgtttcaaggaaattatcaaggaagtcaccaacttcatcaagaaggttggctacgaccccaagggtgttccattcgttccaatctctggtttcaacggtgacaacatgattgaggcctccaccaactgcccatggtacaagggatggaacaaggagaccaaggccggtggtgccaagtccggcaagaccctcctcgaggccatcgatgccatcgacatgccaacccgtcctaccgacaagcccctccgtctcccactccaggatgtctacaagatctctggtatcggaactgtgccagtcggtcgtgttgagaccggtatcatcaagcccggtatggtcgtcaccttngcccccgccaacgtcaccactgaagtcaagtccgtykaaatgcaccaccagcagcttcagcagggtgtccccggtgacaacgtcggcttcaatgtcaagaacgtttccgtcaaggaagtccgccgtggtaacgttgccggtgactccaagaacgacccaccatccggctgtgcctccttcaacgcccaggtcatygtcctcaaccaccccggccagatcggtgctggttacgstccagtcctcgactgccacactgstcacattgcttgcaagttcgctgagctcctcgagaagattgaccgccgtaccggtaaatccgtcgaagccaaccccaagttcgtcaagtctgg

SEQ ID NO: 1270 - DNA, 1105 bp, Microsporum canis
  strain WSA-217
gctgagcgtgagcgtggtatcaccattgatatcgccctctggaagttcgagacccccaagtacatggtcaccgtcatcggtatgctttatctgtttcccatttatagttgcgaccagtaactaacaaaaagtagatgcccccgggcaccgtgacttcatcaagaacatgattactggtacctcccaggccgactgcgctattctcatcattgctgccggtactggtgagttcgaggctggtatctccaaggatggccagactcgtgagcacgccctgctcgctttcaccctcggtgtcaagcagctcatcgttgccatcaacaagatggacaccaccaactggtctgagtcccgtttcggtgaaatcatcaaggaagtcaccaacttcatcaagaaggtcggctacgaccccaagggtgtcccattcgtcccaatctctggcttcaacggtgacaacatgattgagccctccaccaactgcccatggtacaagggatggaacaaggagaccaaggccggtggcaaatcctctggtaagaccctccttgaggccatcgatgccattgacatgcccactcgtcccaccgacaagcctctccgtctcccactccaggatgtctacaagatctctggtatcggaacagtaccagtcggtcgtgttgagactggtatcatcaagcctggtatggttgtcactttygcccccgccaacgtcaccactgaagtcaagtccgtcgaaatgcaccaccagcagctygtccagggtgttcccggtgacaacgttggcttcaacgtcaagaacgtytctgtcaaggaagtccgccgtggtaacgttgccggtgattccaagaacgacccaccagctggctgcgcctctttcaaggcccaggtcatcgtcctcaaccaccccggccagatcggtgctggttacgccccagtccttgactgccacactgcccacattgcttgcaagttctctgagcttcttgagaagattgaccgccgtactggtaaatccgtcgaaaccagccctaagttcgtcaagtctggtgatgccgctattgccaccatggttccatccaagcccatgtgcgttgaggctttc

SEQ ID NO: 1271 - DNA, 1244 bp, Aspergillus versicolor
  strain WSA-175
gagcgtgagcgtggtatcaccatcgatatcgctctctggaagttccagacccctaagtatgaggtcaccgtcattggtatgttgtccttcttgtgttaccatcgaaacatatctaacctacaactgcagacgcccccggtcaccgtgacttcatcaagaacatgatcactggtacctcccaggccgactgcgctattctcatcattgcttccggtactggtgaattcgaggctggtatctccaaggatggccagacccgtgagcacgctctgctcgctttcaccctcggtgtccgtcagctcatcgttgccctcaacaagatggacactgctggctgggctgaggctcgttacaacgaaatcgtcaaggaaacttccggtttcatcaagaaggtcggctacaaccccaagtcggttcccttcgtccccatctccggtttcaacggtgacaacatgcttgagccctcctccaactgcccctggtacaagggttgggagaaggagaccaaggctggtaaggccactggtaagaccctcctcgaggccatcgacgccattgagcctcccgtccgtccctccaacaagcctctccgtcttcccctccaggatgtctacaagatctctggtattggaactgtccccgtcggccgtgtcgagaccggtaccatcgtccccggtatggtcgtcaccttcgctcccgccaacgtcaccactgaagtcaagtccgttgagatgcaccaccagcagctcaaggagggtgttcccggtkacaacgttggtttcaacgtgaagaacgtttccgtcaaggaagtccgccgtggtaacgtcgctggtgactccaagaacgacccccctgccggtgctgcctctttcaccgcccaggtcatcgtcctcaaccaccccggtcaggtcggcgctggttacgctcccgtcctcgactgccacaccgctcacattgcctgcaagttcgctgagctccaggagaagatcgaccgccgtaccggaaagtctgtcgaatytgcccccaagttcatcaagtctggtgacgccgctatcgtcaagatgattccctccaagcccatgtgtgtcgagtctttcactgactaccctcctytcggccgtttcgccgtccgtgacgtaagttctttccccagcttttcgatgctacccttctmtgaatcacgtgtcatgtcttggcacccgcccatcacatgaccacgcaaccctataccccgccacaccctt

SEQ ID NO: 1272 - DNA, 1032 bp, Exophiala moniliae
  strain WSA-219
gctgagcgtgagcgtggtatcaccatcgatatcgctctctggaagttcgagacccccaagtactatgtcaccgtcatcgacgcccccggtcatcgtgacttcatcaagaacatgatcactggtacttcccaagctgactgcgccattctcatcattgctgccggtactggtgaattcgaagccggtatctccaaggatggtcagacccgtgagcacgctctgcttgcctacaccctgggtgtcaagcagctcattgtcgccatcaacaagatggacactaccaagtggtctgaggaccgtttcaacgaaatcatcaaggagacttccagcttcatcaagaaggtcggctacaaccccaagtccgttcctttcgtccccatctccggcttcaacggtgacaacatgatcgacgtctccaccaactgcccctggtacaagggctgggagaaggagaccaaggctggcaaggcctctggcaagactctccttgaggccatcgacgccattgaccccccctctcgtcccaccgacaagcctytccgtctccctctccaggatgtgtacaagatctctggtatcggaacggtgcccgtcggtcgtgtcgagactggtatcatcaaggccggtatggtcgttaccttcgctcctgccaacgtcaccactgaagtcaagtccgtcgaaatgcaccacgaacagctcgccgagggtgttccaggtgacaacgtcggtttcaacgtcaagaacgtytccgtcaaggaggttcgtcgtggaaacgtttgcggtgactccaagaacgacccacccaagggcgctgattccttcaacgcccaggtcatcgtcttgaaccaccctggtcaagttggtgctggctacgccccagtgttggattgccacactgcccacattgcttgcaagttctctgagcttctcgagaagatcgatcgtcgkaccggaaagtcgatcgaaaacaaccccaagttcatcaagtctggtgacgctgccatcgtcaagatggttcccagcaagcccatg

SEQ ID NO: 1273 - DNA, 1106 bp, Hortaea werneckii
  ref <308>: DATABASE ACCESSION NUMBER: ATCC 34944
taacagcccgtgcgaccgtctcgtccaataactaatgattcgcaggtactatgtcgtgagtatccggtccttttttgttaatttaccagaaatgacgaaatttttgactaattaacacactcagaccgtcattgacgccccgggtcaccgtgacttcatcaagaacatgatcactggtacctcccaggccgactgcgctgtcctcatcattgctgccggtactggtgagttcgaggctggtatctccaaggatggccagacccgtgagcacgccctgctcgcctacaccctcggtgtcaagcagctcatcgtcgccatcaataagatggacaccaccaagtggtccgaggagcgttacggcgagatcatcaaggagacctctgccttcatcaagaaggtcggtttcaacccgaagcacgtcccgttcgtcccgatctccggtttcaacggtgacaacatgatcgaggcctycaccaactgcccgtggtacaagggctgggagaaggagaccaaggccaaggtcaccggcaagaccctycttgaggccattgacaacatcgacccgccgagccgtccttccgacaagccgctccgtcttcccctccaggatgtctacaagatcggtggtattgggacagtcccagtcggccgtgtcgagaccggtaccatcaaggccggcatggtcgttaccttcgctccggctggtgtcaccactgaagtgaagtccgttgaratgcaccacgagcagctcgctgagggtytgccgggtgacaacgtcggcttcaacgtcaagaacgtttccgtcaaggagatccgtcgtggcaacgttgctggtgacagcaaggctgacccgccgaagggctgcgacagcttcaacgcccaggtcatcgtcctgaaccaccctggccaggtcggtgctggttacgctccagtcctggactgccacactgcccacattgcctgcaagttcggcgagctcctcgagaagatcgaccgtcgctytggcaagtccattgaagcctygcctaagtacatcaagtctggtgacgctgccatygtcaagatgattccgtccaagccgatgtgcgttgagccattcactgagt

SEQ ID NO: 1274 - DNA, 1119 bp, Fusarium solani
  ref <308>: DATABASE ACCESSION NUMBER: ATCC 32793
ctcaaggccgagcgtgagcgtggtatcaccatcgacattgccctctggaagttcgagactccccgctactatgtcaccgtcattggtatgttgctgtcacctctctcacacatgtctcaccactaacaatcaacagacgcccccggccaccgtgatttcatcaagaacatgatcactggtacttcccaggccgactgcgccattctcatcattgccgccggtactggtgagttcgaggctggtatctccaaggatggccagacccgtgagcacgccctgctcgcctacaccctcggtgtcaagaacctcattgtcgccatcaacaagatggacaccaccaagtggtccgagtcccgttaccaggagatcatcaaggagacctccaacttcatcaagaaggtcggctacaaccccaaggctgtcgctttcgtccccatctccggtttcaacggcgacaacatgcttactccctccaccaactgcccctggtacaagggctgggagcgtgagatcaagtccggcaagctcactggcaagaccctcctcgaggccattgactccatcgagccccccaagcgtcccgtcgacaagcccctycgacttcccctccaggatgtctacaagatcggtggtattggcacggttcccgtcggccgtatcgagactggtgtcatcaagcccggtatggtcgttaccttmgccccctccaacgtcaccactgaagtcaagtccgtcgaratgcaccacgagcagctctytgagggtcttcccggtgacaacgtcggcttcaacgtgaagaacgtytccgtcaaggagatccgacgtggcaacgtcgctggtgactccaagaacgacccccctytgggtgccgcctctttcaccgcccaggtcattgtcctcaaccaccctggccaggtcggtgccggttacgcccccgttytggactgccacactgcccacattgcctgcaagttcgccgagatccaggagaagatcgaccgccgaactggtaaggctgttgagtccgcccccaagttcatcaagtctggtgactccgccatcgtcaagatggttccctccaagcccatgtgcgttgaggctttcactgactacccccct

SEQ ID NO: 1275 - DNA, 1113 bp, Aureobasidium pullulans
  strain WSA-234
ctgaagtctgagcgtgagcgtggtatcactatcgatatcgccctctggaagttcgagacccccaagtacatggtcaccgtcatcgatgcccccggtcaccgtgatttcatcaagaacatgatcactggtacctcccaggctgactgcgccattctcatcattgctgccggtactggtgagttcgaggctggtatctccaaggatggccagactcgtgagcacgctctcctcgcctacacccttggtgtcaagcagctcatcgttgccatcaacaagatggacaccaccaagtggtctgaggcccgttaccaggagatcatcaaggagacctccggtttcatcaagaaggtcggctacaaccccaagcacgttcccttcgtccccatctccggcttcaacggagacaacatgatcgaggtcagctccaactgcccttggtacaagggttgggagaaggagaccaaggccaaggccactggcaagaccctcctcgaggccattgacgccatcgaccctccttcccgtcctaccgacaagcccctccgtcttcccctccaggatgtctacaagatcggtggtattggcacggtgcccgtcggtcgtgttgagaccggtaagatcatgggtggtatggttgtcaccttcgcccccgctggtgtcaccaccgaggtcaagtccgtcgagatgcaccacgagcagctcaccgagggtcttcccggtgacaacgtcggcttcaacgtcaagaacgtytccgtcaaggagatccgtcgtggcaacgttgccggtgactccaagaacgacccccccaagggttgtgactccttcaacgcccaggtcatcgtcctgaaccaccctggtcaggtcggtgctggttacgcacccgtcctcgactgccacactgcccacattgcttgcaagttytccgagcttgttgagaagattgaccgcagaaccggcaagtccgttgaggctgcccccaagttcatcaagtctggtgacgccgccatcgtcaagatggttccctccaagcccatgtgtgttgaggctttcaccgactaccctcctytcggtcgtttcgccgtccggtatgtttttcttcttcaatcattcttc

SEQ ID NO: 1276 - DNA, 731 bp, Blastomyces dermatitidis
  ref <308>: DATABASE ACCESSION NUMBER: ATCC 14112
ggtctgagacccgtttcaacgaaattatcaaggaagtcagcaacttcatcaagaaggtcggatacaaccccaagtctgttcccttcgtgccaatctccggtttcgagggtgacaacatgattgagccttcccccaactgcccttggtacaagggctggaacaaggagactgctgctggcaaggccgccggtaagactcttctcgatgccattgacgccatcgacccccccgtccgtcctaccgagaagcctctccgtcttcccctccaggatgtgtacaagatctccggtattggcactgttcccgttggacgtgtcgagactggtgtcatcaagcctggtatggtcgtgaccttcgcccctgccaacgtcaccactgaagtcaagtccgttgaaatgcaccaccagcagctccaggctggttaccctggtgacaacgtcggcttcaacgtcaagaacgtttccgtcaaggaagtccgccgtggcaacgttgccggtgactccaagaacgacccccccaagggctgcgagtccttcaacgcccaggtcatcgtcctcaaccaccccggccaggttggcgctggttatgccccagtcctcgactgccacactgcccacattgcttgcaagttctctgagctcatcgagaagattgaccgccgtaccggaaagtctgttgaggacaaccccaagttcatcaagtccggtgatgctgctatcgtcaagatgatt

SEQ ID NO: 1277 - DNA, 1046 bp, Exophiala dermatitidis
  ref <308>: DATABASE ACCESSION NUMBER: ATCC 76088
ccgagcgtgagcgtggtatcaccatcgatatcgccctctggaagttcgagacccccaagtactatgtcaccgtcatcgacgccccgggtcatcgtgactttatcaagaacatgatcactggtacctcgcaggccgactgcgccatcttgatcattgccgccggtaccggtgaattcgaagccggtatctccaaggatggtcagacccgtgagcacgctctgctcgcctacaccttgggtgtcaagcagctcatcgtcgccatcaacaagatggacaccaccaagtggtccgaggagcgtttcaacgaaatcatcaaggagacttccaacttcatcaagaaggtcggctacaaccccaaggccgttcctttcgtccccatctccggcttcaacggtgacaacatgattgaggtctccaccaactgcccgtggtacaagggatgggagaaggagtccaaggctggcaaggccaccggcaagaccctcctcgaggccattgacgccatcgacccacccacccgtcccaccgacaagcctctccgtctccctctccaggatgtctacaagatctctggtatcggaacggttcctgtcggtcgtgtcgagaccggtaccatcaaggccggtatggtcgtcaccttcgctccggccaacgtcaccactgaagtcaagtccgtcgaaatgcaccacgagcagctcgccgagggtytgccaggtgacaacgttggcttcaacgtcaagaacgtytccgtcaaggaggttcgtcgtggtaacgttgccggtgactccaagaacgacccgcccaagggtgccgagtccttcaacgcccaggtcattgtcctcaaccaccctggtcagatcggtgccggctacgctccagtcttggattgccacactgcccacattgcttgcaagttcgccgagttgctcgagaagatcgaccgtcgtaccggaaagtccatcgagaacaaccccaagttcatcaagtctggtgatgctgccatcgtcaagatgattcccagcaagcccatgtgtgtcgaggctttc

SEQ ID NO: 1278 - DNA, 1109 bp, Fusarium moniliforme
  strain WSA-213
cgtgagcgtggtatcaccatcgatattgctctctggaagttcgagactcctcgctactatgtcaccgtcattggtatgttgtcgctcatacctcatcctacttcctcatactaacacatcattcagacgctcccggtcaccgtgatttcatcaagaacatgatcactggtacttcccaggccgattgcgccattctcatcattgccgccggtactggtgagttcgaggctggtatctccaaggatggccagacccgtgagcacgctcttcttgcctacacccttggtgtcaagaacctcatcgtcgccatcaacaagatggacaccaccaagtggtctgaggcccgttaccaggagatcatcaaggagacctcctctttcatcaagaaggtcggctacaaccccaaggctgtcgctttcgtccccatctccggtttcaacggtgacaacatgcttaccccctccaccaactgcccctggtacaagggttgggagcgtgagatcaagtccggcaagctctccggcaagaccctcctcgaggccattgactccatcgagcctcccaagcgtcccgttgacaagcccctccgtcttcccctccaggatgtctacaagatcggtggtattggaacggttcccgtcggccgtattgagactggtgtcatcaagcccggtatggtcgttaccttcgctccctccaacgtcaccactgaagtcaagtccgtcgaratgcaccacgagcagytcagtkagggccagcccggtgacaacgttggtttcaacgtgaagaacgtttccgtcaaggacatccgacgtggtaacgtcgctggtgactccaagaacgaccccccccagggtgccgcttctttcaccgcccaggtcatcgtcctcaaccaccccggccaggtcggtgctggttacgctcctgtcctcgattgccacactgcccacattgcctgcaagttcgccgagatccaggagaagatcgaccgccgaaccggtaaggctactgaggccgctcccaagttcatcaagtctggtgactccgccatcgtcaagatggttccctccaagcccatgtgtgtcgaggctttcactgactaccctcct

SEQ ID NO: 1279 - DNA, 765 bp, Aspergillus terreus
  strain WSA-174
cctgcaagtggtctgaggaccgttacaacgaaatcgtgaaggagacctccaacttcatcaagaaggtcggctacaaccccaaggccgttcccttcgtccccatctccggtttcaacggtgacaacatgcttgagccttcccccaactgcccctggtacaagggttgggagaaggagggcaagtccggcaaggtcaccggtaagactctcctcgaggccatcgatgccatcgagccccccgtccgtcctgccaacaagcctctccgtcttcccctccaggatgtgtacaagatctctggtatcggaactgtccccgtcggccgtgtcgagactggtgtcatcacccccggcatggttgttaccttcgctccttccaacgtcaccactgaagtgaagtccgttgagatgcaccaccagcagctcaaggagggtctccccggtgacaacgttggtttcaacgtcaagaacgtctccgtcaaggaggtccgtcgtggtaacgtcgctggtgactccaagaacgacccccctgctggcgctgcctccttcaccgcccaggtcatcgttctcaaccaccccggtcaggtcggcgctggctacgcccccgtcctcgactgccacactgcccacattgcctgcaagttcgctgagctccaggagaagattgaccgccgtaccggaaagtctgttgagtcttctcccaagttcatcaagtctggtgatgctgccatcgtcaagatgatccctycaaagcccatgtgcgtcgaag

SEQ ID NO: 1280 - DNA, 1105 bp, Aspergillus fumigatus
  ref <308>: DATABASE ACCESSION NUMBER: ATCC 64746
gcgtggtatcaccatcgacattgccctctggaagttccagactcccaagtatgaggtcactgtcatcggtaagctcgactcgccccgatatgttttggtgctgtagctaacacgatctgaagatgcccccggtcaccgtgacttcatcaagaacatgatcactggtacctcccaggctgactgcgctatcctcatcattgcctccggtactggtgagttcgaggctggtatctccaaggatggccagacccgtgagcacgctctgctggctttcaccctcggtgtcaagcagctcatcgtcgccctcaacaagatggacacctgcaagtggtccgaggatcgttacaacgaaattgtcaaggaaacctccaacttcatcaagaaggtcggctacaaccccaaggccgttcccttcgtmcccatckctggcttcaacggtgacaacatgcttgagccctcctccaactgcccctggtacaagggatgggagaaggagaccaaggccggcaaggtcactggtaagaccctcatcgaggccatygacgccattgagccccctgtccgtccctccaacaagcccctycgtcttcccctccaggatgtytacaagatctctggtatcggaacggtccctgtcggccgtgtcgagaccggtatcatcaagcccggcatggtcgtcacctttgcccccgccaacgtcaccactgaagtcaagtccgtcgaaatgcaccaccagcagctccaggagggtgtccccggtgacaacgtcggtttcaacgtcaagaacgtttccgtcaaggaagtccsccgtggtaacgtttgcggtgactccaagaacgatccccctcagggtgctgcctccttcaacgcccaggtcatcgtcctcaaccaccccggtcaggtcggcgctggttacgcccccgtcctcgactgccacactgcccacattgcttgcaagttctytgagctgcttgagaagattgaccgccgtaccggcaagtctgttgagaacaaccccaagttcatcaagtccggtgawgccgccatcgtgaagatggttccttccaagcccatgtgtgtcgagtccttcactgactacccccct

SEQ ID NO: 1281 - DNA, 1343 bp, Cryptococcus laurentii
  ref <308>: DATABASE ACCESSION NUMBER: ATCC 44096
gccgagcgagagcgaggtatcaccatcgacattgctctctggaagttcgagacccccaagtacaacgtcaccgtcattgacgcccccggacaccgagacttcatcaagaacatgatcaccggtacctcccaggccgactgcgccatccttatcattgccaccggtatcggagagttcgaggccggtatctctaaggacggtcagacccgagagcacgctttgctcgccttcaccctcggtgtcaggcagctcatcgttgcttgcaacaagatggacacctgcaagtggtccgaggaccgattcaacgagatcgtcaaggagaccaacggtttcatcaagaaggtcggatacaaccccaaggctgttcccttcgtccccatctctggatggcacggagacaagtgagtgccgttctttgcgttgagccctctttgtcgctccccctccctctcaagtggcggcggcggtctccacccacaaatcgggtggcgaatccgccacacccaccacttctcgccaccgagtgtggcacttcttccaactcctctttccactcctcctcgtctcgtctctttttttctccgttgtctttgacaaggggagtgtgctgatagtaaagcatgcttgaggagaccaccaacatgccgtggtacaagggatggaccaaggagaccaagtccggtgtcgttaagggtaagaccctcctcgacgccatcgacgccatcgagcctcctcaacgacccaccgacaagcccctccgacttcccctccaggatgtctacaagatcggtggtatcggtacggtgcccgtcggccgagtcgagaccggtgtcatcaaggccgggtaagtcacgggagcctgacggctgttgttgccacacccaacttatatccagtatggtcgtcaccttcgctcctaccaacgtcaccactgaggttaagtccgttgagatgcaccacgagcagatccctgagggtcttcccggagacaacgttggtttcaacgtgaagaacgtttccatcaaggacatccgacgaggaaacgtytgctccgactccaagaacgaccccgctaaggaggccgcttctttcaacgcccaggtcattgtcctcaaccaccctggacagattggtgccggttacacccccgtcctcgactgccacaccgcccacattgcctgcaagttcgccgagctcatcgagaagatcgaccgacgaactggtaagaccatggaggccgcccccaagttcgtcaagtccggagacgccgccattgtcaagctcgttgcccagaagcccatctgtgtcgagtcttactctgactaccctccccttggacgatt

SEQ ID NO: 1282 - DNA, 734 bp, Emmonsia parva
  ref <308>: DATABASE ACCESSION NUMBER: ATCC 10784
tggtccgaggctcgtttcaacgaaatcatcaaggaagtcaccaacttcatcaagaaggtcggatacaaccccaagtctgttcccttcgtgccaatctctggtttcgagggtgataacatgattgagccctccaccaactgcccctggtacaagggctggaccaaggagaccgctgccggcaagtcaaccggtaagactcttcttgacgccattgatgccatcgatcaaccctcccgtcctaccgacaagcccctccgtcttcccctccaggatgtgtacaagatctccggtattggcactgttcccgttggacgtgttgagactggtatcatcaagcctggtatggtcgtgaccttcgctccctccaacgtcaccactgaagtcaagtccgtcgaaatgcaccaccaacagctcttggctggtaaccccggtgacaacgtcggtttcaacgtcaagaacgtttccgtcaaggaagtccgccgtggcaacgttgctggtgactcaaagaacgacccccccaagggctgcgactccttcaacgcccaggtcatcgtcctcaatcaccccggtcaagttggcgctggttatgccccagtcctcgactgccacactgcccacattgcttgcaagttctctgagctcctcgagaagattgaccgccgtaccggaaagtccactgagaacaaccccaagttcatcaagtctggtgacgccgctatcgtcaagatggttcc

SEQ ID NO: 1283 - DNA, 1107 bp, Fusarium solani
  ref <308>: DATABASE ACCESSION NUMBER: ATCC 62877
cgtgagcgtggtatcaccatcgacattgccctctggaagttcgagactccccgctactatgtcaccgtcattggtatgttgctgtcacctctctcacacatgtctcaccactaacaatcaacagacgcccccggccaccgtgacttcatcaagaacatgatcactggtacttcccaggccgactgcgccattctcatcattgccgctggtactggtgagttcgaggctggtatctccaaggatggccagacccgtgagcacgccctgctcgcctacaccctcggtgtcaagaacctcattgtcgccatcaacaagatggacaccaccaagtggtccgagtcccgttaccaggagatcatcaaggagacctccaacttcatcaagaaggtcggctacaaccccaaggctgtcgctttcgtccccatctccggtttcaacggcgacaacatgcttactccctccaccaactgcccctggtacaagggctgggagcgtgagatcaagtccggcaagctcactggcaagaccctcctcgaggccattgactccatcgagccccccaagcgtcccgtcgacaagcccctccgacttcccctccaggatgtctacaagatcggtggtattggcacggttcccgtcggccgtatcgagactggtgtcatcaagcccggtatggtcgttaccttcgccccctccaacgtcaccactgaagtcaagtccgtcgagatgcaccacgagcagctctytgagggtcttcccggtgacaacgtcggcttcaacgtkaagaacgtytccgtcaaggagatccgacgtggcaacgtcgctggtgactccaagaacgacccccctytgggtgccgcctctttcaccgcccaggtcattgtcctcaaccaccctggccaggtcggtgccggttacgcccccgttytggactgccacactgcccacattgcctgcaagttcgccgagatccaggagaagatcgaccgccgaactggtaaggctgttgagtccgcccccaagttcatcaagtctggtgactccgccatcgtcaagatggttccctccaagcccatgtgcgttgaggctttcactgactacccccct

SEQ ID NO: 1284 - DNA, 1045 bp, Sporothrix schenckii
  ref <308>: DATABASE ACCESSION NUMBER: ATCC 14285
gctcaaggccgagcgtgagcgcggtatcaccatcgatattgctctgtggaagttcgagacccccaagtactacgtcaccgtcattgacgcccccggtcatcgcgatttcatcaagaacatgatcactggtacctcgcaggccgactgcgccattctcatcattgccgctggtactggtgagttcgaggctggtatctccaaggatggccagactcgtgagcacgctctgctcgcctacaccctgggtgtgcggcagctgatcgtcgccatcaacaagatggacacggccaagtgggctgaggctcgttaccaggagatcatcaaggagacctccaacttcatcaagaaggtcggctacaaccccaagactgttgccttcgtccccatctcgggcttccacggcgacaacatgcttactccctcgaccaactgcccctggtacaagggctgggagaaggagggcaagagcggcaaggttaccggtaagactctgctggacgccattgacgccgtcgagccccccaagcgccccacggacaagcccctgcgtctgcccctccaggatgtctacaagatcggcggtatcggcactgtccctgtcggccgtatcgagactggtgtcctgaagcccggcatggtcgtcacctttgccccgtccaacgtcaccactgaagtcaagtccgtcgagatgcaccacgagcagcttgttgagggtgttcccggcgacaacgtcggcttcaacgtcaagaacgtytccgtcaaggagatccgtygtggcaacgttgccggtgactccaagaacgaccccccctcgggcgccgccaccttcaacgcccaggtcattgtcctgaaccaccccggccaggtcggcaacggctacgccccggttytggactgccacaccgcccacattgcctgcaagttcaccgagatccttgagaagatcgaccgccgtaccggcaagtcggttgagaacaaccccaagttcatcaagtcgggtgacgccgccattgtcaagctgacgccctygaagcccatgtgcgtt

SEQ ID NO: 1285 - DNA, 764 bp, Aspergillus nidulans
  strain WSA-176
ttgccagtggtccgaggcccgttacaacgaaatcgtcaaggagacttccggtttcatcaagaaggtcggatacaaccccaagtccgttgccttcgtccccatctccggtttcaacggtgacaacatgctcgaggcctctaccaactgcccctggtacaagggttgggagaaggagaccaaggccggtaaggccactggtaagaccctccttgaggccatcgacgccattgagccccccacccgtccctccaacaagcccctccgtcttcccctccaggatgtctacaagatctccggtattggaactgtccccgtcggccgtgtcgagactggtgttatcacccccggcatggtcgtcaccttcgctcctgccaacgtcaccactgaagtcaagtccgttgagatgcaccaccagcagctcaaggagggtgtccccggtgacaacgtcggtttcaacgtcaagaacgtttccgtcaaggaaatccgtcgtggtaacgttgcctccgactccaagaacgaccccgcctccggcgctgcctctttcaacgcccaggtcatcgttctcaaccaccccggtcaggtcggtgctggttacgcccccgtcctcgactgccacaccgcccacattgcttgcaagttctctgagcttcttgagaagattgaccgccgtaccggaaaggctgttgaaaccagccccaagttcatcaagtccggtgacgctgccatcgtcaagatgattccttccaagcccatgtgcgktccga

SEQ ID NO: 1286 - DNA, 971 bp, Cladophialophora carrionii
  ref <308>: DATABASE ACCESSION NUMBER: ATCC 16264
accatcgatatcgcgctctggaagttcgagactcccaagtacttcgtcaccgtcatcgatgcccctggtcatcgtgacttcatcaagaacatgatcactggtacctcccaggctgattgtgctattctcatcattgccgctggtactggtgagttcgaggccggtatctccaaggatggccagacccgtgagcatgctctgctcgcctacaccctgggcgtgaagcagcttatcgtcgccatcaacaagatggacaccaccaaatggtctgaggatcgtttcaacgaaatcatcaaggagacttccaacttcatcaagaaggtcggatacaaccccaagtccgttccattcgtgcccatctccggcttcaacggtgacaacatgatcgacgtctccaccaatgccccctggtacaagggctgggaaaaggagtccaaggctggcaaggccaccggcaagaccctccttgaggctatcgactccatcgaccctcctgctcgtcccaccgacaagcctctccgtctcccactccaggatgtctacaagatttctggtatcggcacggtgcccgtcggtcgtgttgagactggtaccatcaaggccggtatggtcgtcacctttgcccccgccaacgtcaccactgaagtcaagtccgtcgaaatgcaccacgaacagctygccgagggcgttccgggtgacaacgtcggcttcaacgtcaagaacgtytccgtgaaggaggttcgtcgtggaaacgttgctggtgactccaagaacgacccccccaagggtgccgactccttcaacgcccaggtcatcgtcctcaaccaccctggtcaggtcggtgctggctacgccccggtcttggattgccacactgcccacattgcctgcaagttctytgagctcctcgagaagatcgatcgtcgkaccggcaagtccatggaaaacaaccccaagttcatcaagtctgg

SEQ ID NO: 1287 - DNA, 732 bp, Exserohilum rostratum
  strain WSA-215
ggtctgaggaccgttaccaggagatcatcaaggagacctccaacttcatcaagaaggtcggctacaaccccaagcacgttcccttcgtccccatctccggtttcaacggagacaacatgatcgaggcctccagcaactgcccctggtacaagggttgggagaaggagaccaaggccaaggccactggtaagaccctccttgaggccattgacgccatcgaccctcccagccgtcctaccgacaagcccctccgtcttcccctccaggatgtctacaagattggtggtattggcacggttcccgtcggtcgtgtcgagaccggtatcatcaaggccggtatggtcgtcaccttcgcccccgctggtgtcaccactgaagtcaagtccgtcgagatgcaccacgagcagcttaccgagggtgtccccggtgacaacgtcggcttcaacgtcaagaacgtctccgtcaaggagatccgtcgtggtaacgttgccggtgactccaagaacgacccccccaagggctgcgagtctttcaacgctcaggtcattgtcctcaaccaccctggtcaggtcggtgccggttacgcgccagtcctcgactgccacaccgcccacattgcctgcaagttctctgagctcctcgagaagattgaccgccgtaccggaaagtctgtcgaagcctctcccaagttcatcaagtctggtgacgcggccatcgtcaagatggttccct

SEQ ID NO: 1288 - DNA, 337 bp, Bacillus thuringiensis
  strain HER 1236
aatggatcctgtatacgcacaaaaattaggcgttaacatagatgaattrctattatcacagcctgatacaggggagcaaggattggaaatcgcggaagcacttgtacgaagtggtgcggttgacattatcgtaattgactctgtagcagctcttgtaccgaaagcagagattgaaggcgatatgggtgactcacacgtaggtttacaagcacgtttaatgtcacaagcacttmgtaagctttcaggagcaatcaacaaatcarrarcaatwgcaatctttattaaccaaattcgwgaaaaagttggggttatgttcggaaacccagaaacaactcca

SEQ ID NO: 1289 - DNA, 336 bp, Bacillus thuringiensis
  strain HER 1232
aatggatcctgtatatgcacaaaaattaggcgttaacatagatgaattrctattatcacagcctgatacaggggagcaaggattggaaatcgcggaagcacttgtacgaagtggtgcggttgacattatcgtaattgactctgtagcagctcttgtaccgaaagcagagattgaaggcgatatgggtgactcacacgtaggtttacaagcacgtttaatgtcacaagcacttmgtaagctttcaggagcaatcaacaaatcaraarcaattgcaatctttattaaccaaattcgtgaaaaagttggggttatgttcggaaacccagaaacaactcc

SEQ ID NO: 1290 - DNA, 23 bp, Artificial Sequence
  Synthetic DNA Sequence
  modified_base (9): i
  modified_base (13): i
  modified_base (15): i
  modified_base (18): i
gaytaygcnatgnsngtnathgt

SEQ ID NO: 1291 - DNA, 23 bp, Artificial Sequence
  Synthetic DNA Sequence
  modified_base (3): i
  modified_base (6): i
  modified_base (9): i
  modified_base (15): i
  modified_base (18): i
gcnytnccngaygtnmgngaygg

SEQ ID NO: 1292 - DNA, 20 bp, Artificial Sequence
  Synthetic DNA Sequence
  modified_base (3): i
  modified_base (9): i
  modified_base (12): i
  modified_base (18): i
arnscytcnarnatrtgngc

SEQ ID NO: 1293 - DNA, 20 bp, Artificial Sequence
  Synthetic DNA Sequence
atggctgaattacctcaatc

SEQ ID NO: 1294 - DNA, 25 bp, Artificial Sequence
  Synthetic DNA Sequence
atgattgttgtatatcttcttcaac

SEQ ID NO: 1295 - DNA, 20 bp, Artificial Sequence
  Synthetic DNA Sequence
cagaaagtttgaagcgttgt

SEQ ID NO: 1296 - DNA, 20 bp, Artificial Sequence
  Synthetic DNA Sequence
aacgattcgtgagtcagata

SEQ ID NO: 1297 - DNA, 22 bp, Artificial Sequence
  Synthetic DNA Sequence
cggtcaacattgaggaagagct

SEQ ID NO: 1298 - DNA, 23 bp, Artificial Sequence
  Synthetic DNA Sequence
acgaaatcgaccgtctctttttc

SEQ ID NO: 1299 - DNA, 2661 bp, Staphylococcus aureus
  strain 601055
atggctgaattacctcaatcaagaataaatgaacgaaatattaccagtgaaatgcgtgaatcatttttagattatgcgatgagtgttatcgttgctcgtgcattgccagatgttcgtgacggtttaaaaccagtacatcgtcgtatactatatggattaaatgaacaaggtatgacaccggataaatcatataaaaaatcagcacgtatcgttggtgacgtaatgggtaaatatcaccctcatggtgactcatctatttatgaagcaatggtacgtatggctcaagatttcagttatcgttatccgcttgttgatggccaaggtaactttggttcaatggatggagatggcgcagcagcaatgcgttatactgaagcgcgtatgactaaaatcacacttgaactgttacgtgatattaataaagatacaatagattttatcgataactatgatggtaatgaaagagagccgtcagtcttacctgctcgattccctaatttattagccaatggtgcatcaggtatcgcggtaggtatggcaacgaatattccaccacataacttaacagaattaatcaatggtgtacttagcttaagtaagaaccctgatatttcaattgctgagttaatggaagatattgaaggtcctgatttcccaactgctggacttattttaggtaagagtggtattagacgtgcatatgaaacaggtcgtggttcaattcaaatgcgttctcgtgcagttattgaagaacgtggaggcggacgtcaacgtattgttgtcactgaaattcctttccaagtgaataaggctcgtatgattgaaaaaattgcagagctcgttcgtgacaagaaaattgacggtatcactgatttacgtgatgaaacaagtttacgtactggtgtgcgtgtcgttattgatgtgcgtaaggatgcaaatgctagtgtcattttaaataacttatacaaacaaacacctcttcaaacatcatttggtgtgaatatgattgcacttgtaaatggtagaccgaagcttattaatttaaaagaagcgttggtacattatttagagcatcaaaagacagttgttagaagacgtacgcaatataacttacgtaaagctaaagatcgtgcccatattttagaagggttacgtatcgcacttgaccatatcgatgaaattatttcaacgattcgtgagtcagatacagataaagttgcaatggaaagcttgcaacaacgcttcaaactttctgaaaaacaagctcaagctattttagacatgcgtttaagacgtctaacaggtttagagagaaacaaaattgaagctgaatataatgagttattaaattatattagtgaattagaagccatcttagctgatgaagaagtgttattacagttagttagagatgaattgactgaaattagagatcgtttcggtgatgagcgtcgtacagaaattcaattaggtggatttgaagacttagaggacgaagacttaattccagaagaacaaatagtaattactttgagccataataactacattaaacgtttgccggtatctacatatcgtgctcaaaaccgtggtggtcgtggtgttcaaggtatgaatacattggaagaagattttgtcagtcaattggtaactttaagtacacatgaccatgtattgttctttactaacaaaggtcgtgtatacaaactaaaaggttatgaagtgcctgagttatcaagacagtctaaaggtattcctgtagtgaatgctattgaacttggaaatgatgaagtcattagtacaatgattgctgttaaagaccttgaaagtgaagacaacttcttagtgtttgcaactaaacgtggtgttgttaaacgttcagcattaagtaacttctcaagaataaatagaaatggtaagattgcgatttcgttcagagaagatgatgagttaattgcagttcgtttaacaagtggtcaagaagatatcttgattggtacatcacatgcatcattaattcgattccctgaatcaacattacgtcctttaggccgtacagcaacgggtgtgaaaggtattacacttcgtgaaggtgacgaagttgtagggcttgatgtagctcatgcaaacagtgttgatgaagtattagtagttactgaaaatggttatggtaaacgtacgccagttaatgactatcgtttatcaaatcgtggtggtaaaggtattaaaacagctacgattactgagcgtaatggtaatgttgtatgtatcactacagtaactggtgaagaagatttaatgattgttactaatgccggtgtcattattcgactagatgttgcagatatttctcaaaatggtcgtgcagcacaaggtgttcgcttaattcgcttaggcgatgatcaatttgtttcaacggttgctaaagtaaaagaggatgcagatgaagtaaatgaagatgaacaatctactgtatctgaagatggtactgaacaacaacgtgaagcggttgtaaatgatgaaacaccaggaaatgcaattcatactgaagtgattgattcagaagaaaatgatgaagatggacgtattgaagtaagacaagatttcatggatcgtgttgaagaagatatacaacaatcatcagatgaagatgaagaataa

SEQ ID NO: 1300 - DNA, 2628 bp, Escherichia coli
  strain K12
atgagcgaccttgcgagagaaattacaccggtcaacattgaggaagagctgaagagctcctatctggattatgcgatgtcggtcattgttggccgtgcgctgccagatgtccgagatggcctgaagccggtacaccgtcgcgtactttacgccatgaacgtactaggcaatgactggaacaaagcctataaaaaatctgcccgtgtcgttggtgacgtaatcggtaaataccatccccatggtgactcggcggtctatgacacgatcgtccgcatggcgcagccattctcgctgcgttatatgctggtagacggtcagggtaacttcggttctatcgacggcgactctgcggcggcaatgcgttatacggaaatccgtctggcgaaaattgcccatgaactgatggccgatctcgaaaaagagacggtcgatttcgttgataactatgacggcacggaaaaaattccggacgtcatgccaaccaaaattcctaacctgctggtgaacggttcttccggtatcgccgtaggtatggcaaccaacatcccgccgcacaacctgacggaagtcatcaacggttgtctggcgtatattgatgatgaagacatcagcattgaagggctgatggaacacatcccggagccggacttcccgacggcggcaatcattaacggtcgtcgcggtattgaagaagcttaccgtaccggtcgcggcaaggtgtatatccgcgctcgcgcagaagtggaagttgacgccaaaaccggtcgtgaaaccattatcgtccacgaaattccgtatcaggtaaacaaagcgcgcctgatcgagaagattgcggaactggtaaaagaaaaacgcgtggaaggcatcagcgcgctgcgtgacgagtctgacaaagacggtatgcgcatcgtgattgaagtgaaacgcgatgcggtcggtgaagttgtgctcaacaacctctactcccagacccagttgcaggtttctttcggtatcaacatggtggcattgcaccatggtcagccgaagatcatgaacctgaaagacatcatcgcggcgtttgttcgtcaccgccgtgaagtggtgacccgtcgtactattttcgaactgcgtaaagctcgcgatcgtgctcatatccttgaagcattagccgtggcgctggcgaacatcgacccgatcatcgaactgatccgtcatgcgccgacgcctgcagaagcgaaaactgcgctggttgctaatccgtggcagctgggcaacgttgccgcgatgctcgaacgtgctggcgacgatgctgcgcgtccggaatggctggagccagagttcggcgtgcgtgatggtctgtactacctgaccgaacagcaagctcaggcgattctggatctgcgtttgcagaaactgaccggtcttgagcacgaaaaactgctcgacgaatacaaagagctgctggatcagatcgcggaactgttgcgtattcttggtagcgccgatcgtctgatggaagtgatccgtgaagagctggagctggttcgtgaacagttcggtgacaaacgtcgtactgaaatcaccgccaacagcgcagacatcaacctggaagatctgatcacccaggaagatgtggtcgtgacgctctctcaccagggctacgttaagtatcagccgctttctgaatacgaagcgcagcgtcgtggcgggaaaggtaaatctgccgcacgtattaaagaagaagactttatcgaccgactgctggtggcgaacactcacgaccatattctgtgcttctccagccgtggtcgcgtctattcgatgaaagtttatcagttgccggaagccactcgtggcgcgcgcggtcgtccgatcgtcaacctgctgccgctggagcaggacgaacgtatcactgcgatcctgccagtgaccgagtttgaagaaggcgtgaaagtcttcatggcgaccgctaacggtaccgtgaagaaaactgtcctcaccgagttcaaccgtctgcgtaccgccggtaaagtggcgatcaaactggttgacggcgatgagctgatcggcgttgacctgaccagcggcgaagacgaagtaatgctgttctccgctgaaggtaaagtggtgcgctttaaagagtcttctgtccgtgcgatgggctgcaacaccaccggtgttcgcggtattcgcttaggtgaaggcgataaagtcgtctctctgatcgtgcctcgtggcgatggcgcaatcctcaccgcaacgcaaaacggttacggtaaacgtaccgcagtggcggaatacccaaccaagtcgcgtgcgacgaaaggggttatctccatcaaggttaccgaacgtaacggtttagttgttggcgcggtacaggtagatgactgcgaccagatcatgatgatcaccgatgccggtacgctggtacgtactcgcgtttcggaaatcagcatcgtgggccgtaacacccagggcgtgatcctcatccgtactgcggaagatgaaaacgtagtgggtctgcaacgtgttgctgaaccggttgacgaggaagatctggataccatcgacggcagtgccgcggaaggggacgatgaaatcgctccggaagtggacgttgacgacgagccagaagaagaataa

SEQ ID NO: 1301 - DNA, 23 bp, Artificial Sequence
  Synthetic DNA Sequence
  modified_base (3): i
  modified_base (6): i
  modified_base (9): i
  modified_base (12): i
  modified_base (15): i
  modified_base (18): i
gtnmgnawnmgnccngsnatgta

SEQ ID NO: 1302 - DNA, 23 bp, Artificial Sequence
  Synthetic DNA Sequence
  modified_base (3): i
  modified_base (6): i
  modified_base (9): i
  modified_base (12): i
  modified_base (15): i
  modified_base (18): i
tanadnggnggnkkngcnatrta

SEQ ID NO: 1303 - DNA, 20 bp, Artificial Sequence
  Synthetic DNA Sequence
  modified_base (3): i
  modified_base (6): i
  modified_base (9): i
  modified_base (12): i
  modified_base (15): i
ggngangandynmgngargg

SEQ ID NO: 1304 - DNA, 19 bp, Artificial Sequence
  Synthetic DNA Sequence
  modified_base (2): i
  modified_base (8): i
  modified_base (11): i
  modified_base (14): i
cnaryttnkynttngtytg

SEQ ID NO: 1305 - DNA, 22 bp, Artificial Sequence
  Synthetic DNA Sequence
atggtgactgcattgtcagatg

SEQ ID NO: 1306 - DNA, 22 bp, Artificial Sequence
  Synthetic DNA Sequence
gtctacggttttctacaacgtc

SEQ ID NO: 1307 - DNA, 1923 bp, Staphylococcus aureus
atggtgactgcattgtcagatgtaaacaacacggataattatggtgctgggcaaatacaagtattagaaggtttagaagcagtacgtaaaagaccaggtatgtatataggatcgactcagagagagttgcacattagtgtggaaattgtcgataatagtatcgatgaagcattagctggttatgcaaataaaattgaagttgttattgaaaaagataactggattaaagtaacggataacggacgtggtatcccagttgatattcaagaaaaaatgggacgtccagctgtcgaagttattttaactgttttacatgctggtggtaaattcggcggtggcggatacaaagtatctggtggtttacatggtgttggttcatcagttgtaaacgcattgtcacaagacttagaagtatatgtacacagaaatgagactatatatcatcaagcatataaaaaaggtgtacctcaatttgacttaaaagaagttggcacaactgataagacaggtactgtcattcgttttaaagcagatggagaaatcttcacagagacaactgtatacaactatgaaacattacagcagcgtattagagagcttgctttcttaaacaaaggaattcaaatcacattaagagatgaacgtgatgaagaaaacgttagagaagactcctatcactatgagggcggtattaaatcgtacgttgagttattgaacgaaaataaagaacctattcatgatgagccaatttatattcatcaatctaaagatgatattgaagtagaaattgcgattcaatataactcaggatatgccacaaatcttttaacttacgcaaataacattcatacgtacgaaggtggtacgcatgaagacggattcaaacgtgcattaacgcgtgtcttaaatagttatggtttaagtagcagatatgaagaagaaaagatagcttctggtgaagatacacgagaaggtatgacagcaattatatctatcaaacatggtgatcctcaattcgaaggtcaaacgaagacaaaattaggtaattctgaagtgcgtcaagttgtagataaattattctcagagcactttgaacgatttttatatgaaaatccacaagtcgcacgtacagtggttgaaaaaggtattatggcggcacgtgcacgtgttgctgcgaaaaaagcgcgtgaagtaacacgtcgtaaatcagcgttagatgtagcaagtcttccaggtaaattagccgattgctctagtcaaagtcctgaagaatgtgagattttcttagtcgaaggggactctgccggagggtctacaaaatctggtcgtgactctagaacgcaggcgattttaccattacgaggtaagatattaaatgttgaaaaagcacgattagatagaattttgaataacaatgaaattcgtcaaatgatcacagcatttggtacaggaatcggtggcgactttgatctagcgaaagcaagatatcacaaaatcgtcattatgactgatgccgatgtggatggagcgcatattagaacattgttattaatattcttctatcgatttatgagaccgttaattgaagcaggctatgtgtatattgcacagccaccgttgtataaactgacacaaggtaaacaaaagtattatgtatacaatgatagggaacttgataaacttaaatctgaattgaatccaacaccaaaatggtctattgcgctatacaaaggtcttggagaaatgaatgcagatcaattatgggaaacaacaatgaaccctgagcaccgcgctcttttacaagtaaaacttgaagatgcgattgaagcggaccaaacatttgaaatgttaatgggtgacgttgtagaaaaccgtagacaatttatagaagataatgcagtttatgcaaacttagacttctaa

SEQ ID NO: 1308 - DNA, 23 bp, Artificial Sequence
  Synthetic DNA Sequence
  modified_base (9): i
  modified_base (12): i
  modified_base (21): i
atgtaygtnatnatggaymgngc

SEQ ID NO: 1309 - DNA, 23 bp, Artificial Sequence
  Synthetic DNA Sequence
  modified_base (3): i
  modified_base (12): i
  modified_base (18): i
atnatyttrttnccyttnccytt

SEQ ID NO: 1310 - DNA, 20 bp, Artificial Sequence
  Synthetic DNA Sequence
  modified_base (3)
  modified_base (6): i
  modified_base (9): i
  modified_base (12): i
atnatntsnatnacytcrtc

SEQ ID NO: 1311 - DNA, 23 bp, Artificial Sequence
  Synthetic DNA Sequence
  modified_base (12): i
  modified_base (15): i
  modified_base (18): i
garatgaaratnmgnggngarca

SEQ ID NO: 1312 - DNA, 23 bp, Artificial Sequence
  Synthetic DNA Sequence
  modified_base (9): i
  modified_base (12): i
  modified_base (21): i
aartayatnatncargarmgngc

SEQ ID NO: 1313 - DNA, 23 bp, Artificial Sequence
  Synthetic DNA Sequence
  modified_base (3): i
  modified_base (6): i
  modified_base (12): i
  modified_base (15): i
  modified_base (18): i
amnaynckrtgnggnttnttytt

SEQ ID NO: 1314 - DNA, 23 bp, Artificial Sequence
  Synthetic DNA Sequence
  modified_base (3): i
  modified_base (6): i
  modified_base (12): i
  modified_base (15): i
  modified_base (18): i
tanganttyacngansmncargc

SEQ ID NO: 1315 - DNA, 23 bp, Artificial Sequence
  Synthetic DNA Sequence
  modified_base (3): i
  modified_base (6): i
  modified_base (9): i
  modified_base (12): i
  modified_base (18): i
acnatngcntcngcytgnksytc

SEQ ID NO: 1316 - DNA, 22 bp, Artificial Sequence
  Synthetic DNA Sequence
gtgagtgaaataattcaagatt

SEQ ID NO: 1317 - DNA, 22 bp, Artificial Sequence
  Synthetic DNA Sequence
caccaaaatcatctgtatctac

SEQ ID NO: 1318 - DNA, 26 bp, Artificial Sequence
  Synthetic DNA Sequence
acctaytcsatgtacgtratcatgga

SEQ ID NO: 1319 - DNA, 23 bp, Artificial Sequence
  Synthetic DNA Sequence
  modified_base (9): i
agrtcgtcnaccatcggyagytt

SEQ ID NO: 1320 - DNA, 2259 bp, Escherichia coli
  strain K-12 MG1655
atgagcgatatggcagagcgccttgcgctacatgaatttacggaaaacgcctacttaaactactccatgtacgtgatcatggaccgtgcgttgccgtttattggtgatggtctgaaacctgttcagcgccgcattgtgtatgcgatgtctgaactgggcctgaatgccagcgccaaatttaaaaaatcggcccgtaccgtcggtgacgtactgggtaaataccatccgcacggcgatagcgcctgttatgaagcgatggtcctgatggcgcaaccgttctcttaccgttatccgctggttgatggtcaggggaactggggcgcgccggacgatccgaaatcgttcgcggcaatgcgttacaccgaatcccggttgtcgaaatattccgagctgctattgagcgagctggggcaggggacggctgactgggtgccaaacttcgacggcactttgcaggagccgaaaatgctacctgcccgtctgccaaacattttgcttaacggcaccaccggtattgccgtcggcatggcgaccgatattccaccgcataacctgcgtgaagtggctcaggcggcaatcgcattaatcgaccagccgaaaaccacgctcgatcagctgctggatatcgtgcaggggccggattatccgactgaagcggaaattatcacttcgcgcgccgagatccgtaaaatctacgagaacggacgtggttcagtgcgtatgcgcgcggtgtggaagaaagaagatggcgcggtggttatcagcgcattgccgcatcaggtttcaggtgcgcgcgtactggagcaaattgctgcgcaaatgcgcaacaaaaagctgccgatggttgacgatctgcgcgatgaatctgaccacgagaacccgacccgcctggtgattgtgccgcgttccaaccgcgtggatatggatcaggtgatgaaccacctcttcgctaccaccgatctggaaaagagctatcgtattaaccttaatatgatcggtctggatggtcgtccggcggtgaaaaacctgctggaaatcctctccgaatggctggtgttccgccgcgataccgtgcgccgccgactgaactatcgtctggagaaagtcctcaagcgcctgcatatcctcgaaggtttgctggtggcgtttctcaatatcgacgaagtgattgagatcattcgtaatgaagatgaaccgaaaccggcgctgatgtcgcggtttggccttacggaaacccaggcggaagcgatcctcgaactgaaactgcgtcatcttgccaaactggaagagatgaagattcgcggtgagcagagtgaactggaaaaagagcgcgaccagttgcagggcattttggcttccgagcgtaaaatgaataacctgctgaagaaagaactgcaggcagacgcgcaagcctacggtgacgatcgtcgttcgccgttgcaggaacgcgaagaagcgaaagcgatgagcgagcacgacatgctgccgtctgaacctgtcaccattgtgctgtcgcagatgggctgggtacgcagcgctaaaggccatgatatcgacgcgccgggcctgaattataaagcgggtgatagcttcaaagcggcggtgaaaggtaagagcaaccaaccggtagtgtttgttgattccaccggtcgtagctatgccattgacccgattacgctgccgtcggcgcgtggtcagggcgagccgctcaccggcaaattaacgttgccgcctggggcgaccgttgaccatatgctgatggaaagcgacgatcagaaactgctgatggcttccgatgcgggttacggtttcgtctgcacctttaacgatctggtggcgcgtaaccgtgcaggtaaggctttgatcaccttaccggaaaatgcccatgttatgccgccggtggtgattgaagatgcttccgatatgctgctggcaatcactcaggcaggccgtatgttgatgttcccggtaagtgatctgccgcagctgtcgaagggcaaaggcaacaagattatcaacattccatcggcagaagccgcgcgtggagaagatggtctggcgcaattgtacgttctgccgccgcaaagcacgctgaccattcatgttgggaaacgcaaaattaaactgcgcccggaagagttacagaaagtcactggcgaacgtggacgccgcggtacgttgatgcgcggtttgcagcgtatcgatcgtgttgagatcgactctcctcgccgtgccagcagcggtgatagcgaagagtaa

SEQ ID NO: 1321 - DNA, 2403 bp, Staphylococcus aureus
  strain KMP9
gtgagtgaaataattcaagatttatcacttgaagatgttttaggtgatcgctttggaagatatagtaaatatattattcaagagcgtgcattgccagatgttcgtgatggtttaaaaccagtacaacgtcgtattttatatgcaatgtattcaagtggtaatacacacgataaaaatttccgtaaaagtgcgaaaacagtcggtgatgttattggtcaatatcatccacatggagacttctcagtgtacaaagcaatggtccgtttaagtcaagactggaagttacgacatgtcttaatagaaatgcatggtaataatggtagtatcgataatgatccgccagcggcaatgcgttacactgaagctaagttaagcttactagctgaagagttattacgtgatattaataaagagacagtttctttcattccaaactatgatgatacgacactcgaaccaatggtattgccatcaagatttcctaacttactagtgaatggttctacaggtatatctgcaggttacgcgacagatataccaccacataatttagctgaagtgattcaagcaacacttaaatatattgataatccggatattacagtcaatcaattaatgaaatatattaaaggtcctgattttccaactggtggtattattcaaggtattgatggtattaaaaaagcttatgaatcaggtaaaggtagaattatagttcgttctaaagttgaagaagaaactttacgcaatggacgtaaacagttaattattactgaaattccatatgaagtgaacaaaagtagcttagtaaaacgtatcgatgaattacgtgctgacaaaaaagtcgatggtatcgttgaagtacgtgatgaaactgatagaactggtttacgaatagcaattgaattgaaaaaagatgtgaacagtgaatcaatcaaaaattatctttataaaaactctgatttacagatttcatataatttcaacatggtcgctattagtgatggtcgtccaaaattgatgggtattcgtcaaattatagatagttatttgaatcatcaaattgaggttgttgcaaatagaacgaagtttgaattagataatgctgaaaaacgtatgcatatcgttgaaggtttgattaaagcgttgtcaattttagataaagtaattgaattgattcgtagctctaaaaacaagcgtgacgctaaagaaaaccttatcgaagtattcgagttcacagaagaacaggctgaagcaattgtaatgttacagttatatcgtttaacaaacactgacatagttgcgcttgaaggtgaacataaagaacttgaagcattaatcaaacaattacgtcatattcttgataaccatgatgcattattgaatgtcataaaagaagaattgaatgaaattaaaaagaaattcaaatctgaacgactgtctttaattgaagcagaaattgaagaaattaaaattgacaaagaagttatggtgcctagtgaagaagttattttaagtatgacacgtcatggatatattaaacgtacttctattcgtagctttaatgctagcggtgttgaggatattggtttaaaagatggtgacagtttacttaaacatcaagaagtaaatacgcaagataccgtactagtatttacaaataaaggtcgttatctatttataccggttcataaattagcagatattcgttggaaagaattggggcaacatgtatcacaaatagttcctatcgaagaagatgaagtggttattaatgtctttaatgaaaaggactttaatacagatgcattttatgtttttgcgactcaaaatggcatgattaagaaaagtacagtgcctctatttaaaacaacgcgttttaataaacctttaattgctactaaagttaaagaaaatgatgatttgattagtgttatgcgctttgaaaaagatcaattaattaccgtcattactaataaaggtatgtcattaacgtataatacaagtgaactatcagataccggattaagggcagctggtgttaaatcaataaatcttaaagctgaagatttcgttgttatgacagaaggtgtttctgaaaatgatactatattgatggccacacaacgcggctcgttaaaacgtattagttttaaaatcttacaagttgctaaaagagcacaacgtggaataactttattaaaagaattaaagaaaaatccacatcgtattgtagctgcacatgtagtgacaggtgaacatagtcaatatacattatattcaaaatcaaatgaagaacatggtttaattaatgatattcataaatctgaacaatatacaaatggctcattcattgtagatacagatgattttggtgaagtaatagacatgtatattagctaa

SEQ ID NO: 1322 - DNA, 22 bp, Artificial Sequence
  Synthetic DNA Sequence
  modified_base (3): i
  modified_base (6): i
  modified_base (10): i
  modified_base (12): i
  modified_base (15): i
rtnganaaynsngtngaygarg

SEQ ID NO: 1323 - DNA, 22 bp, Artificial Sequence
  Synthetic DNA Sequence
  modified_base (3): i
  modified_base (9): i
  modified_base (12): i
  modified_base (15): i
  modified_base (18): i
acnawrsanggnggnacncayg

SEQ ID NO: 1324 - DNA, 20 bp, Artificial Sequence
  Synthetic DNA Sequence
  modified_base (3): i
  modified_base (6): i
  modified_base (9): i
  modified_base (15): i
ccnccngcnswrtcnccytc

SEQ ID NO: 1325 - DNA, 21 bp, Artificial Sequence
  Synthetic DNA Sequence
  modified_base (10): i
  modified_base (13): i
  modified_base (16): i
rttcatytcnccnarnccytt

SEQ ID NO: 1326 - DNA, 22 bp, Artificial Sequence
  Synthetic DNA Sequence
tgattcaatacaggttttagag

SEQ ID NO: 1327 - DNA, 22 bp, Artificial Sequence
  Synthetic DNA Sequence
ctagatttcctcctcatcaaat

SEQ ID NO: 1328 - DNA, 1992 bp, Staphylococcus aureus
  strain RN4220
atgaataaacaaaataattattcagatgattcaatacaggttttagaggggttagaagcagttcgtaaaagacctggtatgtatattggatcaactgataaacggggattacatcatctagtatatgaaattgtcgataactccgtcgatgaagtattgaatggttacggtaacgaaatagatgtaacaattaataaagatggtagtatttctatagaagataatggacgtggtatgccaacaggtatacataaatcaggtaaaccgacagtcgaagttatctttactgttttacatgcaggaggtaaatttggacaaggcggctataaaacttcaggtggtcttcacggtgttggtgcttcagttgtaaatgcattgagtgaatggcttgaagttgaaatccatcgagatggtaatatatatcatcaaagttttaaaaacggtggttcgccatcttctggtttagtgaaaaaaggtaaaactaagaaaacaggtaccaaagtaacatttaaacctgatgacacaatttttaaagcatctacatcatttaattttgatgttttaagtgaacgactacaagagtctgcgttcttattgaaaaatttaaaaataacgcttaatgatttacgcagtggtaaagagcgtcaagagcattaccattatgaagaaggaatcaaagagtttgttagttatgtcaatgaaggaaaagaagttttgcatgacgtggctacattttcaggtgaagcaaatggtatagaggtagacgtagctttccaatataatgatcaatattcagaaagtattttaagttttgtaaataatgtacgtactaaagatggtggtacacatgaagttggttttaaaacagcaatgacacgtgtatttaatgattatgcacgtcgtattaatgaacttaaaacaaaagataaaaacttagatggtaatgatattcgtgaaggtttaacagctgttgtgtctgttcgtattccagaagaattattgcaatttgaaggacaaacgaaatctaaattgggtacttctgaagctagaagtgctgttgattcagttgttgcagacaaattgccattctatttagaagaaaaaggacaattgtctaaatcacttgtgaaaaaagcgattaaagcacaacaagcaagggaagctgcacgtaaagctcgtgaagatgctcgttcaggtaagaaaaacaagcgtaaagacactttgctatctggtaaattaacacctgcacaaagtaaaaacactgaaaaaaatgaattgtatttagtcgaaggtgattctgcgggaggttcagcaaaacttggacgagaccgcaaattccaagcgatattaccattacgtggtaaggtaattaatacagagaaagcacgtctagaagatatttttaaaaatgaagaaattaatacaattatccacacaatcggggcaggcgttggtactgactttaaaattgaagatagtaattataatcgtgtaattattatgactgatgctgatactgatggtgcgcatattcaagtgctattgttaacattcttcttcaaatatatgaaaccgcttgttcaagcaggtcgtgtatttattgctttacctccactttataaattggaaaaaggtaaaggcaaaacaaagcgagttgaatacgcttggacagacgaagagcttaataaattgcaaaaagaacttggtaaaggcttcacgttacaacgttacaaaggtttgggtgaaatgaaccctgagcaattatgggaaacgacgatgaacccagaaacacgaactttaattcgtgtacaagttgaagatgaagtgcgttcatctaaacgtgtaacaacattaatgggtgacaaagtacaacctagacgtgaatggattgaaaagcatgttgagtttggtatgcaagaggaccaaagtattttagataattctgaagtacaagtgcttgaaaatgatcaatttgatgaggaggaaatctag

SEQ ID NO: 1329 - DNA, 25 bp, Artificial Sequence
  Synthetic DNA Sequence
tgtagagcgcggtatcatcaaagta

SEQ ID NO: 1330 - DNA, 22 bp, Artificial Sequence
  Synthetic DNA Sequence
agattcgaacttggtgtgcggg

SEQ ID NO: 1331 - DNA, 30 bp, Artificial Sequence
  Synthetic DNA Sequence
gcccttgaggtacagaatggtaatgaagtt

SEQ ID NO: 1332 - DNA, 20 bp, Artificial Sequence
  Synthetic DNA Sequence
gaccgcggcgcagaccatca

SEQ ID NO: 1333 - DNA, 23 bp, Artificial Sequence
  Synthetic DNA Sequence
tcatggtgacttatctatttatg

SEQ ID NO: 1334 - DNA, 23 bp, Artificial Sequence
  Synthetic DNA Sequence
catctatttataaagcaatggta

SEQ ID NO: 1335 - DNA, 19 bp, Artificial Sequence
  Synthetic DNA Sequence
ctatttatggagcaatggt

SEQ ID NO: 1336 - DNA, 17 bp, Artificial Sequence
  Synthetic DNA Sequence
tggagactactcagtgt

SEQ ID NO: 1337 - DNA, 17 bp, Artificial Sequence
  Synthetic DNA Sequence
tggagacttctcagtgt

SEQ ID NO: 1338 - DNA, 15 bp, Artificial Sequence
  Synthetic DNA Sequence
gtgtacggagcaatg

SEQ ID NO: 1339 - DNA, 15 bp, Artificial Sequence
  Synthetic DNA Sequence
ccagcggaaatgcgt

SEQ ID NO: 1340 - DNA, 25 bp, Artificial Sequence
  Synthetic DNA Sequence
gaacaaggtatgacaccggataaat

SEQ ID NO: 1341 - DNA, 25 bp, Artificial Sequence
  Synthetic DNA Sequence
gataactgaaatcctgagccatacg

SEQ ID NO: 1342 - DNA, 24 bp, Artificial Sequence
  Synthetic DNA Sequence
gatgttattggtcaatatcatcca

SEQ ID NO: 1343 - DNA, 29 bp, Artificial Sequence
  Synthetic DNA Sequence
aagaaactgtctctttattaatatcacgt

SEQ ID NO: 1344 - DNA, 24 bp, Artificial Sequence
  Synthetic DNA Sequence
agcagcaacgatgttacgcagcag

SEQ ID NO: 1345 - DNA, 23 bp, Artificial Sequence
  Synthetic DNA Sequence
cccgccgagcatttcaactattg

SEQ ID NO: 1346 - DNA, 22 bp, Artificial Sequence
  Synthetic DNA Sequence
gatgttacgcagcagggcagtc

SEQ ID NO: 1347 - DNA, 24 bp, Artificial Sequence
  Synthetic DNA Sequence
accaagcaggttcgcagtcaagta

SEQ ID NO: 1348 - DNA, 750 bp, Unknown Organism
  Description of Unknown Organism: Unidentified bacterium
atgcgctcacgcaactggtccagaaccttgaccgaacgcagcggtggtaacggcgcagtggcggttttcatggcttgttatgactgtttttttgtacagtctatgcctcgggcatccaagcagcaagcgcgttacgccgtgggtcgatgtttgatgttatggagcagcaacgatgttacgcagcagggcagtcgccctaaaacaaagttaggccgcatggacacaacgcaggtcacattgatacacaaaattctagctgcggcagatgagcgaaatctgccgctctggatcggtgggggctgggcgatcgatgcacggctagggcgtgtaacacgcaagcacgatgatattgatctgacgtttcccggcgagaggcgcggcgagctcgaggcaatagttgaaatgctcggcgggcgcgtcatggaggagttggactatggattcttagcggagatcggggatgagttacttgactgcgaacctgcttggtgggcagacgaagcgtatgaaatcgcggaggctccgcagggctcgtgcccagaggcggctgagggcgtcatcgccgggcggccagtccgttgtaacagctgggaggcgatcatctgggattacttttactatgccgatgaagtaccaccagtggactggcctacaaagcacatagagtcctacaggctcgcatgcacctcactcggggcggaaaaggttgaggtcttgcgtgccgctttcaggtcgcgatatgcggcctaa

SEQ ID NO: 1349 - DNA, 24 bp, Artificial Sequence
  Synthetic DNA Sequence
cagccgaccaatgagtatcttgcc

SEQ ID NO: 1350 - DNA, 24 bp, Artificial Sequence
  Synthetic DNA Sequence
taatcagggcagttgcgactccta

SEQ ID NO: 1351 - DNA, 531 bp, Pseudomonas aeruginosa
  strain Stone 130
atgttatggagcagcaacgatgttacgcagcagggcagtcgccctaaaacaaagttaggtggctcaatgagcatcattgcaaccgtcaagatcggccctgacgaaatttcagccatgagggctgtgctcgatctcttcggcaaagagtttgaggacattccaacctactctgatcgccagccgaccaatgagtatcttgccaatcttctgcacagcgagacgttcatcgcgctcgctgcttttgaccgcggaacagcaataggtgggctcgccgcctacgttctacccaagttcgagcaagcgcgaagcgagatctacatttatgacttggcagtcgcttccagccatcgaaggctaggagtcgcaactgccctgattagccacctgaagcgtgtggcggttgaacttggcgcgtatgtaatctatgtgcaagcagactacggtgacgatccggcagtcgctctctacacaaagcttggagttcgggaagacgtcatgcacttcgacattgatccaagaaccgccacctaa

SEQ ID NO: 1352 - DNA, 22 bp, Artificial Sequence
  Synthetic DNA Sequence
ccacgctgacagagccgcaccg

SEQ ID NO: 1353 - DNA, 22 bp, Artificial Sequence
  Synthetic DNA Sequence
ggccagctcccatcggaccctg

SEQ ID NO: 1354 - DNA, 21 bp, Artificial Sequence
  Synthetic DNA Sequence
cacgctgacagagccgcaccg

SEQ ID NO: 1355 - DNA, 24 bp, Artificial Sequence
  Synthetic DNA Sequence
atgccgttgctgtcgaaatcctcg

SEQ ID NO: 1356 - DNA, 810 bp, Serratia marcescens
atgaacacgatcgaatcgatcacggcggacctgcacggactgggcgtccggcccggcgacctgatcatggtccatgcatcgctgaaagccgtcggcccggtcgagggaggtgcggcctcggtggtgtcggcccttcgcgccgcggtcgggtccgcagggaccctgatgggttatgcctcatgggaccgctcgccctatgaggagacgctgaacggcgcgcggatggacgaagaactgcgccgccggtggccacccttcgatctggccacatccggtacctatcccggcttcggcctgctcaaccggtttctgcttgaggcgcccgacgcacggcgcagcgcgcatcccgacgcctccatggtcgcggtcggcccccttgccgccacgctgacagagccgcaccggcttgggcaggcgctgggcgaaggctcgccgctggagcgcttcgtcgggcatggcggaaaggtcctgcttctgggagcgccgctcgactccgtcaccgtgctgcattacgccgaggccatcgcccccatcccgaacaaacgccgcgtgacctatgaaatgccgatgctcggcccggatggcagggtccgatgggagctggccgaggatttcgacagcaacggcattctcgattgcttcgcggtcgatgggaagccggatgccgtcgagacgatcgccaaggcttatgtcgaactgggccggcatcgggaaggcatcgtcggtcgcgcaccctcctatctgtttgaagcgcaggatatcgtctcgttcggcgtcacctatctcgaacagcatttcggcgcgccctga

SEQ ID NO: 1357 - DNA, 20 bp, Artificial Sequence
  Synthetic DNA Sequence
gcccatccatttgcctttgc

SEQ ID NO: 1358 - DNA, 24 bp, Artificial Sequence
  Synthetic DNA Sequence
gcgtaccaacttgccatcctgaag

SEQ ID NO: 1359 - DNA, 19 bp, Artificial Sequence
  Synthetic DNA Sequence
tgcccctgccacctcactc

SEQ ID NO: 1360 - DNA, 24 bp, Artificial Sequence
  Synthetic DNA Sequence
cgtaccaacttgccatcctgaaga

SEQ ID NO: 1361 - DNA, 786 bp, Escherichia coli
gtgcaatacgaatggcgaaaagccgagctcatcggtcagcttctcaaccttggggttacccccggcggtgtgctgctggtccacagctccttccgtagcgtccggcccctcgaagatgggccacttggactgatcgaggccctgcgtgctgcgctgggtccgggagggacgctcgtcatgccctcgtggtcaggtctggacgacgagccgttcgatcctgccacgtcgcccgttacaccggaccttggagttgtctctgacacattctggcgcctgccaaatgtaaagcgcagcgcccatccatttgcctttgcggcagcggggccacaggcagagcagatcatctctgatccattgcccctgccacctcactcgcctgcaagcccggtcgcccgtgtccatgaactcgatgggcaggtacttctcctcggcgtgggacacgatgccaacacgacgctgcatcttgccgagttgatggcaaaggttccctatggggtgccgagacactgcaccattcttcaggatggcaagttggtacgcgtcgattatctcgagaatgaccactgctgtgagcgctttgccttggcggacaggtggctcaaggagaagagccttcagaaggaaggtccagtcggtcatgcctttgctcggttgatccgctcccgcgacattgtggcgacagccctgggtcaactgggccgagatccgttgatcttcctgcatccgccagagggcgggatgcgaagaatgcgatgccgctcgccagtcgattggctgagctcatga

SEQ ID NO: 1362 - DNA, 22 bp, Artificial Sequence
  Synthetic DNA Sequence
cgccgccatcgcccaaagctgg

SEQ ID NO: 1363 - DNA, 24 bp, Artificial Sequence
  Synthetic DNA Sequence
cggcataatggagcgcggtgactg

SEQ ID NO: 1364 - DNA, 24 bp, Artificial Sequence
  Synthetic DNA Sequence
tttctcgcccacgcaggaaaaatc

SEQ ID NO: 1365 - DNA, 22 bp, Artificial Sequence
  Synthetic DNA Sequence
catcctcgacgaatatgccgcg

SEQ ID NO: 1366 - DNA, 900 bp, Enterobacter cloacae
atgactgatccccgcaaaaacggcgatttgcacgaacccgcgacggcacccgcgacgccctggtccaaaagcgagctggtccggcaattgcgcgacctcggcgtgcgctcaggcgatatggtgatgccgcatgtgtcgttgcgcgccgtcgggccgctggcggacggaccgcagacacttgtcgatgcgctgatcgaggccgtcggccccaccgggaatattctcgccttcgtctcgtggcgcgattcgccctatgaacagacgctgggtcatgatgcgccgcccgccgccatcgcccaaagctggcctgcgttcgaccccgaccatgcgcccgcctaccccggctttggcgcgatcaacgaatttatccgaacctatccggggtgtcggcgcacggcccatcccgacgcatcgatggcggcgatcgggcccgatgcggcgtggctggtggcgccgcacgagatgggcgccgcttatggcccccgctcgccgatcgcgcgttttctcgcccacgcaggaaaaatcctgtcgatcggcgccgggcccgatgcagtcaccgcgctccattatgccgaagcggtggcgcggatcgagggcaagcgccgcgtcacttattcgatgcccttactgcgcgaaggcaagcgcgtctgggtcaccacgtccgactgggattcgaacggcatcctcgacgaatatgccgcgcccgacggccccgacgcggtcgaacggatcgcccgcgactatctcgcccgcaccagggttgcgcaaggcccggtcggcggcgcgcaatcccggctgatcgacgcggccgatatcgtttccttcggcatcgaatggctcgaggcgcgccacgccgcgccagcggcggcagcgctgaagccgaaacaacgccgcgactga

SEQ ID NO: 1367 - DNA, 24 bp, Artificial Sequence
  Synthetic DNA Sequence
caaatatactaacagaagcgttca

SEQ ID NO: 1368 - DNA, 22 bp, Artificial Sequence
  Synthetic DNA Sequence
aggatcttgccaatacctttat

SEQ ID NO: 1369 - DNA, 24 bp, Artificial Sequence
  Synthetic DNA Sequence
aaacctttgtttcggtctgctaat

SEQ ID NO: 1370 - DNA, 24 bp, Artificial Sequence
  Synthetic DNA Sequence
aagcgattccaataataccttgct

SEQ ID NO: 1371 - DNA, 558 bp, Citrobacter diversus
atgaattatcaaattgtgaatattgcggaatgcagcaattatcagttagaagcagcaaatatactaacagaagcgttcaatgatcttggtaacaattcatggccagatatgacgagtgcaacaaaagaagtaaaagaatgtattgagagtccaaacctttgtttcggtctgctaataaataactccttagttggctggataggcttaaggccaatgtacaaggaaacctgggaattgcatccattggttgtcagaccagattatcaaaataaaggtattggcaagatcctgcttaaggaattagaaaacagagctagagagcaaggtattattggaatcgctttaggaacagatgatgaatactatagaacaagtctctctttaataactataacagaagataatatatttgattcaataaaaaatattaaaaatattaataaacatccatatgagttttatcagaagaatggttattatattgttggaataattccaaatgccaatggtaaaaacaaaccagatatttggatgtggaaaagtttaatcaaagagtaa

SEQ ID NO: 1372 - DNA, 24 bp, Artificial Sequence
  Synthetic DNA Sequence
gctttcgttgcctttgccgaggtc

SEQ ID NO: 1373 - DNA, 23 bp, Artificial Sequence
  Synthetic DNA Sequence
cacccctgttgcttcgcccactc

SEQ ID NO: 1374 - DNA, 24 bp, Artificial Sequence
  Synthetic DNA Sequence
agatattggcttcgccgcaccaca

SEQ ID NO: 1375 - DNA, 23 bp, Artificial Sequence
  Synthetic DNA Sequence
ccctgttgcttcgcccactcctg

SEQ ID NO: 1376 - DNA, 441 bp, Serratia marcescens
atgatcgtcatctgcgaccacgacaacctcgacgcctggctggcgctgcgcaccgcgctgtggccctccggctcgcctgaagatcaccgcgcggaaatgcgcgagatattggcttcgccgcaccacaccgcgtttatggcgcgggggctggacggcgctttcgttgcctttgccgaggtcgcgctgcgctacgattacgtcaacggctgcgaatcgtcgccggtggcgtttttggaaggaatttataccgccgaacgcgcccgccgccagggctgggccgcgcgcctgatcgcgcaggtgcaggagtgggcgaagcaacaggggtgcagcgagctggcgtcggataccgatatcgccaatctggactcccagcgcctgcatgcggcgctgggctttgccgaaacggagcgagtagtgttttaccgcaaaacgctgggctga

SEQ ID NO: 1377 - DNA, 24 bp, Artificial Sequence
  Synthetic DNA Sequence
gccgtgggtcgatgtttgatgtta

SEQ ID NO: 1378 - DNA, 24 bp, Artificial Sequence
  Synthetic DNA Sequence
gctcgatgacgccaactacctctg

SEQ ID NO: 1379 - DNA, 24 bp, Artificial Sequence
  Synthetic DNA Sequence
agcagcaacgatgttacgcagcag

SEQ ID NO: 1380 - DNA, 24 bp, Artificial Sequence
  Synthetic DNA Sequence
cgctcgatgacgccaactacctct

SEQ ID NO: 1381 - DNA, 972 bp, Escherichia coli
gtggtaacggcgcagtggcggttttcatggcttcttgttatgacatgtttttttggggtacagtctatgcctcgggcatccaagcagcaagcgcgttacgccgtgggtcgatgtttgatgttatggagcagcaacgatgttacgcagcagggcagtcgccctaaaacaaagttaaacatcatgagggaagcggtgatcgccgaagtatcgactcaactatcagaggtagttggcgtcatcgagcgccatctcgaaccgacgttgctggccgtacatttgtacggctccgcagtggatggcggcctgaagccacacagtgatattgatttgctggttacggtgaccgtaaggcttgatgaaacaacgcggcgagctttgatcaacgaccttttggaaacttcggcttcccctggagagagcgagattctccgcgctgtagaagtcaccattgttgtgcacgacgacatcattccgtggcgttatccagctaagcgcgaactgcaatttggagaatggcagcgcaatgacattcttgcaggtatcttcgagccagccacgatcgacattgatctggctatcttgctgacaaaagcaagagaacatagcgttgccttggtaggtccagcggcggaggaactctttgatccggttcctgaacaggatctatttgaggcgctaaatgaaaccttaacgctatggaactcgccgcccgactgggctggcgatgagcgaaatgtagtgcttacgttgtcccgcatttggtacagcgcagtaaccggcaaaatcgcgccgaaggatgtcgctgccgactgggcaatggagcgcctgccggcccagtatcagcccgtcatacttgaagctagacaggcttatcttggacaagaagaagatcgcttggcctcgcgcgcagatcagttggaagaatttgtccactacgtgaaaggcgagatcaccaaggtagtcggcaaataa

SEQ ID NO: 1382 - DNA, 24 bp, Artificial Sequence
  Synthetic DNA Sequence
tagatatgataggcggtaaaaagc

SEQ ID NO: 1383 - DNA, 23 bp, Artificial Sequence
  Synthetic DNA Sequence
cccaaattcgagtaagaggtatt

SEQ ID NO: 1384 - DNA, 22 bp, Artificial Sequence
  Synthetic DNA Sequence
gatatgataggcggtaaaaagc

SEQ ID NO: 1385 - DNA, 22 bp, Artificial Sequence
  Synthetic DNA Sequence
tcccaaattcgagtaagaggta

SEQ ID NO: 1386 - DNA, 477 bp, Staphylococcus aureus
atgaaagaaagatatggaacagtatataaaggctctcagaggctcatagacgaggaaagtggagaagtaatagaggtagataagctataccgtaaacaaacgtctggtaactttgtaaaagcgtatatcgtccaattaataagtatgttagatatgataggcggtaaaaagctcaagattgttaattatatattagataatgtacatctaagtaataacacaatgatagcaactgttagagaaatagcagaaggaacaaatacaagcacgaaaaccgtaaatacaacgcttaaaatcttagaagaaggaaatatcattaaaagaagaactggagcattaatgctaaacccagagctactcatgagaggcgatgaccaaaaacaaaaatacctcttactcgaatttgggaactttgagcaagaggacgaccaaaagcaagaaaatgctttatcagaatattattctttcaaggagtag

SEQ ID NO: 1387 - DNA, 24 bp, Artificial Sequence
  Synthetic DNA Sequence
ttatgcctcttccgaccatcaagc

SEQ ID NO: 1388 - DNA, 24 bp, Artificial Sequence
  Synthetic DNA Sequence
tacgctcgtcatcaaaatcactcg

SEQ ID NO: 1389 - DNA, 24 bp, Artificial Sequence
  Synthetic DNA Sequence
gaataacggtttggttgatgcgag

SEQ ID NO: 1390 - DNA, 24 bp, Artificial Sequence
  Synthetic DNA Sequence
atggcaagatcctggtatcggtct

SEQ ID NO: 1391 - DNA, 816 bp, Escherichia coli
atgagccatattcaacgggaaacgtcttgctcgaggccgcgattaaattccaacatggatgctgatttatatgggtataaatgggctcgcgataatgtcgggcaatcaggtgcgacaatctatcgattgtatgggaagcccgatgcgccagagttgtttctgaaacatggcaaaggtagcgttgccaatgatgttacagatgagatggtcagactaaactggctgacggaatttatgcctcttccgaccatcaagcattttatccgtactcctgatgatgcatggttactcaccactgcgatccccgggaaaacagcattccaggtattagaagaatatcctgattcaggtgaaaatattgttgatgcgctggcagtgttcctgcgccggttgcattcgattcctgtttgtaattgtccttttaacagcgatcgcgtatttcgtctcgctcaggcgcaatcacgaatgaataacggtttggttgatgcgagtgattttgatgacgagcgtaatggctggcctgttgaacaagtctggaaagaaatgcataagcttttgccattctcaccggattcagtcgtcactcatggtgatttctcacttgataaccttatttttgacgaggggaaattaataggttgtattgatgttggacgagtcggaatcgcagaccgataccaggatcttgccatcctatggaactgcctcggtgagttttctccttcattacagaaacggctttttcaaaaatatggtattgataatcctgatatgaataaattgcagtttcatttgatgctcgatgagtttttctaa

SEQ ID NO: 1392 - DNA, 24 bp, Artificial Sequence
  Synthetic DNA Sequence
tgggtggagaggctattcggctat

SEQ ID NO: 1393 - DNA, 23 bp, Artificial Sequence
  Synthetic DNA Sequence
cagtcccttcccgcttcagtgac

SEQ ID NO: 1394 - DNA, 24 bp, Artificial Sequence
  Synthetic DNA Sequence
gacgttgtcactgaagcgggaagg

SEQ ID NO: 1395 - DNA, 24 bp, Artificial Sequence
  Synthetic DNA Sequence
cttggtggtcgaatgggcaggtag

SEQ ID NO: 1396 - DNA, 795 bp, Escherichia coli
atgattgaacaagatggattgcacgcaggttctccggccgcttgggtggagaggctattcggctatgactgggcacaacagacaatcggctgctctgatgccgccgtgttccggctgtcagcgcaggggcgcccggttctttttgtcaagaccgacctgtccggtgccctgaatgaactgcaggacgaggcagcgcggctatcgtggctggccacgacgggcgttccttgcgcagctgtgctcgacgttgtcactgaagcgggaagggactggctgctattgggcgaagtgccggggcaggatctcctgtcatctcaccttgctcctgccgagaaagtatccatcatggctgatgcaatgcggcggctgcatacgcttgatccggctacctgcccattcgaccaccaagcgaaacatcgcatcgagcgagcacgtactcggatggaagccggtcttgtcgatcaggatgatctggacgaagagcatcaggggctcgcgccagccgaactgttcgccaggctcaaggcgcgcatgcccgacggcgaggatctcgtcgtgacccatggcgatgcctgcttgccgaatatcatggtggaaaatggccgcttttctggattcatcgactgtggccggctgggtgtggcggaccgctatcaggacatagcgttggctacccgtgatattgctgaagagcttggcggcgaatgggctgaccgcttcctcgtgctttacggtatcgccgctcccgattcgcagcgcatcgccttctatcgccttcttgacgagttcttctga

SEQ ID NO: 1397 - DNA, 22 bp, Artificial Sequence
  Synthetic DNA Sequence
gtgggagaaaatgaaaacctat

SEQ ID NO: 1398 - DNA, 20 bp, Artificial Sequence
  Synthetic DNA Sequence
atggagtgaaagagcctgat

SEQ ID NO: 1399 - DNA, 24 bp, Artificial Sequence
  Synthetic DNA Sequence
acctatgatgtggaacgggaaaag

SEQ ID NO: 1400 - DNA, 23 bp, Artificial Sequence
  Synthetic DNA Sequence
cgatggagtgaaagagcctgatg

SEQ ID NO: 1401 - DNA, 795 bp, Enterococcus faecalis
atggctaaaatgagaatatcaccggaattgaaaaaactgatcgaaaaataccgctgcgtaaaagatacggaaggaatgtctcctgctaaggtatataagctggtgggagaaaatgaaaacctatatttaaaaatgacggacagccggtataaagggaccacctatgatgtggaacgggaaaaggacatgatgctatggctggaaggaaagctgcctgttccaaaggtcctgcactttgaacggcatgatggctggagcaatctgctcatgagtgaggccgatggcgtcctttgctcggaagagtatgaagatgaacaaagccctgaaaagattatcgagctgtatgcggagtgcatcaggctctttcactccatcgacatatcggattgtccctatacgaatagcttagacagccgcttagccgaattggattacttactgaataacgatctggccgatgtggattgcgaaaactgggaagaagacactccatttaaagatccgcgcgagctgtatgattttttaaagacggaaaagcccgaagaggaacttgtcttttcccacggcgacctgggagacagcaacatctttgtgaaagatggcaaagtaagtggctttattgatcttgggagaagcggcagggcggacaagtggtatgacattgccttctgcgtccggtcgatcagggaggatatcggggaagaacagtatgtcgagctattttttgacttactggggatcaagcctgattgggagaaaataaaatattatattttactggatgaattgttttag

SEQ ID NO: 1402 - DNA, 24 bp, Artificial Sequence
  Synthetic DNA Sequence
tattcaacaatttatcggaaacag

SEQ ID NO: 1403 - DNA, 23 bp, Artificial Sequence
  Synthetic DNA Sequence
tcagagagccaactcaacatttt

SEQ ID NO: 1404 - DNA, 24 bp, Artificial Sequence
  Synthetic DNA Sequence
aaacagcgttttagagccaaataa

SEQ ID NO: 1405 - DNA, 24 bp, Artificial Sequence
  Synthetic DNA Sequence
ttctcagagagccaactcaacatt

SEQ ID NO: 1406 - DNA, 780 bp, Acinetobacter baumannii
  strain BM2580
atggaattgcccaatattattcaacaatttatcggaaacagcgttttagagccaaataaaattggtcagtcgccatcggatgtttattcttttaatcgaaataatgaaactttttttcttaagcgatctagcactttatatacagagaccacatacagtgtctctcgtgaagcgaaaatgttgagttggctctctgagaaattaaaggtgcctgaactcatcatgacttttcaggatgagcagtttgaattcatgatcactaaagcgatcaatgcaaaaccaatttcagcgctttttttaacagaccaagaattgcttgctatctataaggaggcactcaatctgttaaattcaattgctattattgattgtccatttatttcaaacattgatcatcggttaaaagagtcaaaattttttattgataaccaactccttgacgatatagatcaagatgattttgacactgaattatggggagaccataaaacttacctaagtctatggaatgagttaaccgagactcgtgttgaagaaagattggttttttctcatggcgatatcacggatagtaatatttttatagataaattcaatgaaatttattttttagatcttggtcgtgctgggttagcagatgaatttgtagatatatcctttgttgaacgttgcctaagagaggatgcatcggaggaaactgcgaaaatatttttaaagcatttaaaaaatgatagacctgacaaaaggaattattttttaaaacttgatgaattgaattga

SEQ ID NO: 1407 - DNA, 24 bp, Artificial Sequence
  Synthetic DNA Sequence
ccctgtaatagaaaagcaagtagg

SEQ ID NO: 1408 - DNA, 22 bp, Artificial Sequence
  Synthetic DNA Sequence
ttgtcgtatccctcaaatcacc

SEQ ID NO: 1409 - DNA, 23 bp, Artificial Sequence
  Synthetic DNA Sequence
tgggattacaatggcaatcagcg

SEQ ID NO: 1410 - DNA, 25 bp, Artificial Sequence
  Synthetic DNA Sequence
ggggaataggtcacaagatctgctt

SEQ ID NO: 1411 - DNA, 912 bp, Pseudomonas aeruginosa
atgcttttatataaaatgtgtgacaatcaaaattatggggttacttacatgaagtttttattggcattttcgcttttaataccatccgtggtttttgcaagtagttcaaagtttcagcaagttgaacaagacgttaaggcaattgaagtttctctttctgctcgtataggtgtttccgttcttgatactcaaaatggagaatattgggattacaatggcaatcagcgcttcccgttaacaagtacttttaaaacaatagcttgcgctaaattactatatgatgctgagcaaggaaaagttaatcccaatagtacagtcgagattaagaaagcagatcttgtgacctattcccctgtaatagaaaagcaagtagggcaggcaatcacactcgatgatgcgtgcttcgcaactatgactacaagtgataatactgcggcaaatatcatcctaagtgctgtaggtggccccaaaggcgttactgattttttaagacaaattggggacaaagagactcgtctagaccgtattgagcctgatttaaatgaaggtaagctcggtgatttgagggatacgacaactcctaaggcaatagccagtactttgaataaacttttatttggttccgcgctatctgaaatgaaccagaaaaaattagagtcttggatggtgaacaatcaagtcactggtaatttactacgttcagtattgccggcgggatggaacattgcggatcgctcaggtgctggcggatttggtgctcggagtattacagcagttgtgtggagtgagcatcaagccccaattattgtgagcatctatctagctcaaacacaggcttcaatggcagagcgaaatgatgcgattgttaaaattggtcattcaatttttgacgtttatacatcacagtcgcgc

SEQ ID NO: 1412 - DNA, 21 bp, Artificial Sequence
  Synthetic DNA Sequence
gagaaaacgctccagcagggc

SEQ ID NO: 1413 - DNA, 21 bp, Artificial Sequence
  Synthetic DNA Sequence
catgaggctttcactgcgggg

SEQ ID NO: 1414 - DNA, 21 bp, Artificial Sequence
  Synthetic DNA Sequence
tatcgttaatcgcaccatcac

SEQ ID NO: 1415 - DNA, 21 bp, Artificial Sequence
  Synthetic DNA Sequence
atgcagtaatgcggctttatc

SEQ ID NO: 1416 - DNA, 1146 bp, Klebsiella pneumoniae
  strain HEL-1
atgatgaaaaaatcgttatgctgcgctctgctgctgacagcctctttctccacatttgctgccgcaaaaacagaacaacagattgccgatatcgttaatcgcaccatcaccccgttgatgcaggagcaggctattccgggtatggccgttgccgttatctaccagggaaaaccctattatttcacctggggtaaagccgatatcgccaataaccacccagtcacgcagcaaacgctgtttgagctaggatcggttagtaagacgtttaacggcgtgttgggcggcgatgctatcgcccgcggcgaaattaagctcagcgatccggtcacgaaatactggccagaactgacaggcaaacagtggcagggtatccgcctgctgcacttagccacctatacggcaggcggcctaccgctgcagatccccgatgacgttagggataaagccgcattactgcatttttatcaaaactggcagccgcaatggactccgggcgctaagcgactttacgctaactccagcattggtctgtttggcgcgctggcggtgaaaccctcaggaatgagttacgaagaggcaatgaccagacgcgtcctgcaaccattaaaactggcgcatacctggattacggttccgcagaacgaacaaaaagattatgcctggggctatcgcgaagggaagcccgtacacgtttctccgggacaacttgacgccgaagcctatggcgtgaaatccagcgttattgatatggcccgctgggttcaggccaacatggatgccagccacgttcaggagaaaacgctccagcagggcattgcgcttgcgcagtctcgctactggcgtattggcgatatgtaccagggattaggctgggagatgctgaactggccgctgaaagctgattcgatcatcaacggcagcgacagcaaagtggcattggcagcgcttcccgccgttgaggtaaacccgcccgcccccgcagtgaaagcctcatgggtgcataaaacgggctccactggtggatttggcagctacgtagccttcgttccagaaaaaaaccttggcatcgtgatgctggcaaacaaaagctatcctaaccctgtccgtgtcgaggcggcctggcgcattcttgaaaagctgcaataa

SEQ ID NO: 1417 - DNA, 25 bp, Artificial Sequence
  Synthetic DNA Sequence
tggttaactayaatccsattgcgga

SEQ ID NO: 1418 - DNA, 22 bp, Artificial Sequence
  Synthetic DNA Sequence
atgctttacccagcgtcagatt

SEQ ID NO: 1419 - DNA, 24 bp, Artificial Sequence
  Synthetic DNA Sequence
cgatgaataagctgatttctcacg

SEQ ID NO: 1420 - DNA, 24 bp, Artificial Sequence
  Synthetic DNA Sequence
tgctttacccagcgtcagattacg

SEQ ID NO: 1421 - DNA, 24 bp, Artificial Sequence
  Synthetic DNA Sequence
aattagagcggcagtcgggaggaa

SEQ ID NO: 1422 - DNA, 24 bp, Artificial Sequence
  Synthetic DNA Sequence
gaaatcagcttattcatcgccacg

SEQ ID NO: 1423 - DNA, 876 bp, Escherichia coli
  strain GRI-1
atggttaaaaaatcactgcgtcagttcacgctgatggcgacggcaaccgtcacgctgttgttaggaagtgtgccgctgtatgcgcaaacggcggacgtacagcaaaaacttgccgaattagagcggcagtcgggaggaagactgggtgtggcattgattaacacagcagataattcgcaaatactttatcgtgctgatgagcgctttgcgatgtgcagcaccagtaaagtgatggccgtggccgcggtgctgaagaaaagtgaaagcgaaccgaatctgttaaatcagcgagttgagatcaaaaaatctgacttggttaactataatccgattgcggaaaagcacgtcgatgggacgatgtcactggctgagcttagcgcggccgcgctacagtacagcgataacgtggcgatgaataagctgatttctcacgttggcggcccggctagcgtcaccgcgttcgcccgacagctgggagacgaaacgttccgtctcgaccgtaccgagccgacgttaaacaccgccattccgggcgatccgcgtgataccacttcacctcgggcaatggcgcaaactctgcgtaatctgacgctgggtaaagcattgggtgacagccaacgggcgcagctggtgacatggatgaaaggcaataccaccggtgcagcgagcattcaggctggactgcctgcttcctgggttgtgggggataaaaccggcagcggtgactatggcaccaccaacgatatcgcggtgatctggccaaaagatcgtgcgccgctgattctggtcacttacttcacccagcctcaacctaaggcagaaagccgtcgcgatgtattagcgtcggcggctaaaatcgtcaccaacggtttgtaa

SEQ ID NO: 1424 - DNA, 23 bp, Artificial Sequence
  Synthetic DNA Sequence
gttaacggtgatggcgacgctac

SEQ ID NO: 1425 - DNA, 24 bp, Artificial Sequence
  Synthetic DNA Sequence
gaattatcggcggtgttaatcagc

SEQ ID NO: 1426 - DNA, 22 bp, Artificial Sequence
  Synthetic DNA Sequence
cacgctcaataccgccattcca

SEQ ID NO: 1427 - DNA, 24 bp, Artificial Sequence
  Synthetic DNA Sequence
ttatcgcccactacccatgatttc

SEQ ID NO: 1428 - DNA, 876 bp, Salmonella typhimurium
  strain CAS-5
atgatgactcagagcattcgccgctcaatgttaacggtgatggcgacgctacccctgctatttagcagcgcaacgctgcatgcgcaggcgaacagcgtgcaacagcagctggaagccctggagaaaagttcgggaggtcggcttggcgttgcgctgattaacaccgccgataattcgcagattctctaccgtgccgatgaacgttttgcgatgtgcagtaccagtaaggtgatggcggccgcggcggtgcttaaacagagcgagagcgataagcacctgctaaatcagcgcgttgaaatcaagaagagcgacctggttaactacaatcccattgcggagaaacacgttaacggcacgatgacgctggctgagcttggcgcagcggcgctgcagtatagcgacaatactgccatgaataagctgattgcccatctgggtggtcccgataaagtgacggcgtttgctcgctcgttgggtgatgagaccttccgtctggacagaaccgagcccacgctcaataccgccattccaggcgacccgcgtgataccaccacgccgctcgcgatggcgcagaccctgaaaaatctgacgctgggtaaagcgctggcggaaactcagcgggcacagttggtgacgtggcttaagggcaatactaccggtagcgcgagcattcgggcgggtctgccgaaatcatgggtagtgggcgataaaaccggcagcggagattatggcaccaccaacgatatcgcggttatctggccggaaaaccacgcaccgctggttctggtgacctactttacccaaccggagcagaaggcggaaagccgtcgggatattctggctgcggcggcgaaaatcgtaacccacggtttctga

SEQ ID NO: 1429 - DNA, 25 bp, Artificial Sequence
  Synthetic DNA Sequence
tttacggctaaagatactgaaaagt

SEQ ID NO: 1430 - DNA, 26 bp, Artificial Sequence
  Synthetic DNA Sequence
gtttaataaaacaaccaccgaataat

SEQ ID NO: 1431 - DNA, 25 bp, Artificial Sequence
  Synthetic DNA Sequence
taattgacactccatttacggctaa

SEQ ID NO: 1432 - DNA, 26 bp, Artificial Sequence
  Synthetic DNA Sequence
accgaataatattttcctttcaggca

SEQ ID NO: 1433 - DNA, 741 bp, Pseudomonas aeruginosa
atgagcaagttatctgtattctttatatttttgttttgcagcattgctaccgcagcagagtctttgccagatttaaaaattgaaaagcttgatgaaggcgtttatgttcatacttcgtttgaagaagttaacgggtggggcgttgttcctaaacatggtttggtggttcttgtaaatgctgaggcttacctaattgacactccatttacggctaaagatactgaaaagttagtcacttggtttgtggagcgtggctataaaataaaaggcagcatttcctctcattttcatagcgacagcacgggcggaatagagtggcttaattctcgatctatccccacgtatgcatctgaattaacaaatgaactgcttaaaaaagacggtaaggttcaagccacaaattcatttagcggagttaactattggctagttaaaaataaaattgaagttttttatccaggcccgggacacactccagataacgtagtggtttggttgcctgaaaggaaaatattattcggtggttgttttattaaaccgtacggtttaggcaatttgggtgacgcaaatatagaagcttggccaaagtccgccaaattattaaagtccaaatatggtaaggcaaaactggttgttccaagtcacagtgaagttggagacgcatcactcttgaaacttacattagagcaggcggttaaagggttaaacgaaagtaaaaaaccatcaaaaccaagcaactaa

SEQ ID NO: 1434 - DNA, 25 bp, Artificial Sequence
  Synthetic DNA Sequence
cacaatcaagaccaagatttgcgat

SEQ ID NO: 1435 - DNA, 25 bp, Artificial Sequence
  Synthetic DNA Sequence
gaaagggcagctcgttacgatagag

SEQ ID NO: 1436 - DNA, 24 bp, Artificial Sequence
  Synthetic DNA Sequence
cagcatcaacatttaagatcccca

SEQ ID NO: 1437 - DNA, 26 bp, Artificial Sequence
  Synthetic DNA Sequence
ctccacttgattaactgcggaaattc

SEQ ID NO: 1438 - DNA, 828 bp, Escherichia coli
atggcaatccgaatcttcgcgatacttttctccattttttctcttgccactttcgcgcatgcgcaagaaggcacgctagaacgttctgactggaggaagtttttcagcgaatttcaagccaaaggcacgatagttgtggcagacgaacgccaagcggatcgtgccatgttggtttttgatcctgtgcgatcgaagaaacgctactcgcctgcatcgacattcaagatacctcatacactttttgcacttgatgcaggcgctgttcgtgatgagttccagatttttcgatgggacggcgttaacaggggctttgcaggccacaatcaagaccaagatttgcgatcagcaatgcggaattctactgtttgggtgtatgagctatttgcaaaggaaattggtgatgacaaagctcggcgctatttgaagaaaatcgactatggcaacgccgatccttcgacaagtaatggcgattactggatagaaggcagccttgcaatctcggcgcaggagcaaattgcatttctcaggaagctctatcgtaacgagctgccctttcgggtagaacatcagcgcttggtcaaggatctcatgattgtggaagccggtcgcaactggatactgcgtgcaaagacgggctgggaaggccgtatgggttggtgggtaggatgggttgagtggccgactggctccgtattcttcgcactgaatattgatacgccaaacagaatggatgatcttttcaagagggaggcaatcgtgcgggcaatccttcgctctattgaagcgttaccgcccaacccggcagtcaactcggacgctgcgcgataa

SEQ ID NO: 1439 - DNA, 801 bp, Pseudomonas aeruginosa
atgaaaacatttgccgcatatgtaattatcgcgtgtctttcgagtacggcattagctggttcaattacagaaaatacgtcttggaacaaagagttctctgccgaagccgtcaatggtgtcttcgtgctttgtaaaagtagcagtaaatcctgcgctaccaatgacttagctcgtgcatcaaaggaatatcttccagcatcaacatttaagatccccaacgcaattatcggcctagaaactggtgtcataaagaatgagcatcaggttttcaaatgggacggaaagccaagagccatgaagcaatgggaaagagacttgaccttaagaggggcaatacaagtttcagctgttcccgtatttcaacaaatcgccagagaagttggcgaagtaagaatgcagaaataccttaaaaaattttcctatggcaaccagaatatcagtggtggcattgacaaattctggttggaaggccagcttagaatttccgcagttaatcaagtggagtttctagagtctctatatttaaataaattgtcagcatctaaagaaaaccagctaatagtaaaagaggctttggtaacggaggcggcacctgaatatctagtgcattcaaaaactggtttttctggtgtgggaactgagtcaaatcctggtgtcgcatggtgggttgggtgggttgagaaggagacagaggtttactttttcgcctttaacatggatatagacaacgaaagtaagttgccgctaagaaaatccattcccaccaaaatcatggaaagtgagggcatcattggtggctaa

SEQ ID NO: 1440 - DNA, 26 bp, Artificial Sequence
  Synthetic DNA Sequence
agaccgttatcgtaaacagggctaag

SEQ ID NO: 1441 - DNA, 26 bp, Artificial Sequence
  Synthetic DNA Sequence
ttttttgctcaaactttttcaggatc

SEQ ID NO: 1442 - DNA, 927 bp, Pseudomonas aeruginosa
  strain RNL-1
atgaatgtcattataaaagctgtagttactgcctcgacgctactgatggtatcttttagttcattcgaaacctcagcgcaatccccactgttaaaagagcaaattgaatccatagtcattggaaaaaaagccactgtaggcgttgcagtgtgggggcctgacgatctggaacctttactgattaatccttttgaaaaattcccaatgcaaagtgtatttaaattgcatttagctatgttggtactgcatcaggttgatcagggaaagttggatttaaatcagaccgttatcgtaaacagggctaaggttttacagaatacctgggctccgataatgaaagcgtatcagggagacgagtttagtgttccagtgcagcaactgctgcaatactcggtctcgcacagcgataacgtggcctgtgatttgttatttgaactggttggtggaccagctgctttgcatgactatatccagtctatgggtataaaggagaccgctgtggtcgcaaatgaagcgcagatgcacgccgatgatcaggtgcagtatcaaaactggacctcgatgaaaggtgctgcagagatcctgaaaaagtttgagcaaaaaacacagctgtctgaaacctcgcaggctttgttatggaagtggatggtcgaaaccaccacaggaccagagcggttaaaaggtttgttaccagctggtactgtggtcgcacataaaactggtacttcgggtatcaaagccggaaaaactgcggccactaatgatttaggtatcattctgttgcctgatggacggcccttgctggttgctgtttttgtgaaagactcagccgagtcaagccgaaccaatgaagctatcattgcgcaggttgctcagactgcgtatcaatttgaattgaaaaagctttctgccctaagcccaaattaa

SEQ ID NO: 1443 - DNA, 23 bp, Artificial Sequence
  Synthetic DNA Sequence
cttctgctctgctgatgcttggc

SEQ ID NO: 1444 - DNA, 26 bp, Artificial Sequence
  Synthetic DNA Sequence
ggcgaccaggtattttgtaatactgc

SEQ ID NO: 1445 - DNA, 927 bp, Salmonella typhimurium
  strain JMC
atgaatgtcatcacaaaatgtgttttcaccgcttctgctctgctgatgcttggcttaagttcatttgtagtatcagcccaatcccctttgttaaaagagcagattgaaaccatagtgacgggtaaaaaggccactgtaggtgtagcagtgtgggggcctgacgatctggaacctttgttgctgaatccatttgaaaagtttccgatgcaaagtgtgtttaaactgcatttagctatgttagttctgcatcaggtcgatcaggggaaactggatttaaatcagtctgttactgttaatcgtgctgcagtattacaaaatacctggtcgccaatgatgaaagatcatcagggcgatgaatttactgttgcagtacagcagttactgcagtattcggtgtcacacagcgacaatgtggcctgcgatttgttatttgaactggtgggcgggccgcaagctttgcatgcttatatccagtctttaggcgttaaagaagctgccgtggtagcaaatgaagcgcaaatgcatgcggatgatcaggtgcaatatcaaaactggacgtcgatgaaagccgcagcacaagttctgcaaaagtttgaacagaaaaagcagttgtctgaaacctctcaggccttgttatggaaatggatggttgaaaccaccacaggaccacagcggttaaaaggcttgttacctgctggtactatagtggcgcataaaaccggtacttcgggcgtcagagcaggaaaaactgcggcgactaatgatgcgggcgtcattatgttgcctgatggacggcctttattggtggcggtatttgtcaaggattcggctgaatcagaacgaaccaatgaagctattattgcgcaggttgcgcaagcggcttatcagtttgagctgaaaaaactctctgcagtgagtccggattga

SEQ ID NO: 1446 - DNA, 27 bp, Artificial Sequence
  Synthetic DNA Sequence
ggcctgygatttgttatttgaactggt

SEQ ID NO: 1447 - DNA, 23 bp, Artificial Sequence
  Synthetic DNA Sequence
cgctstggtcctgtggtggtttc

SEQ ID NO: 1448 - DNA, 26 bp, Artificial Sequence
  Synthetic DNA Sequence
gatcaggtgcartatcaaaactggac

SEQ ID NO: 1449 - DNA, 26 bp, Artificial Sequence
  Synthetic DNA Sequence
agcwggtaacaayccttttaaccgct

SEQ ID NO: 1450 - DNA, 26 bp, Artificial Sequence
  Synthetic DNA Sequence
accactgggaatacacttgtaatggc

SEQ ID NO: 1451 - DNA, 26 bp, Artificial Sequence
  Synthetic DNA Sequence
atctacctggtcaatcattgcttcgt

SEQ ID NO: 1452 - DNA, 486 bp, Staphylococcus epidermidis
  strain BM10393
atgacattatcaataattgtcgctcacgataaacaaagagtcattgggtaccaaaatcaattaccttggcacttaccaaatgatttaaagcatattaaacaactgaccactgggaatacacttgtaatggcacggaaaacttttaattctatagggaagccattgccaaatagacgtaacgtcgtactcactaaccaagcttcatttcaccatgaaggggtagatgttataaactctcttgatgaaattaaagagttatctggtcatgtttttatatttggaggacaaacgttatacgaagcaatgattgaccaggtagatgatatgtatatcacagtaatagatggaaagtttcaaggagacacattctttccaccatacacattcgaaaactgggaagtcgaatcttcagtagaaggtcaactagatgaaaaaaatactataccgcatacattcttacatttagtgcgtagaaaagggaaatag

SEQ ID NO: 1453 - DNA, 26 bp, Artificial Sequence
  Synthetic DNA Sequence
atcgaagaatggagttatcggraatg

SEQ ID NO: 1454 - DNA, 25 bp, Artificial Sequence
  Synthetic DNA Sequence
cctaaaaytrctggggatttcwgga

SEQ ID NO: 1455 - DNA, 24 bp, Artificial Sequence
  Synthetic DNA Sequence
caggtggtggggagatatacaaaa

SEQ ID NO: 1456 - DNA, 26 bp, Artificial Sequence
  Synthetic DNA Sequence
tatgttagasrcgaagtcttggktaa

SEQ ID NO: 1457 - DNA, 22 bp, Artificial Sequence
  Synthetic DNA Sequence
caaaggtgaacagctcctgttt

SEQ ID NO: 1458 - DNA, 27 bp, Artificial Sequence
  Synthetic DNA Sequence
tccgttattttctttaggttggttaaa

SEQ ID NO: 1459 - DNA, 20 bp, Artificial Sequence
  Synthetic DNA Sequence
aaggtgaacagctcctgttt

SEQ ID NO: 1460 - DNA, 22 bp, Artificial Sequence
  Synthetic DNA Sequence
gatcactacgttctcattgtca

SEQ ID NO: 1461 - DNA, 474 bp, Escherichia coli
gtgaaactatcactaatggtagctatatcgaagaatggagttatcgggaatggccctgatattccatggagtgccaaaggtgaacagctcctgtttaaagctattacctataaccaatggctgttggttggacgcaagacttttgaatcaatgggagcattacccaaccgaaagtatgcggtcgtaacacgtccaagttttacatctgacaatgagaacgtagtgatctttccatcaattaaagatgctttaaccaacctaaagaaaataacggatcatgtcattgtttcaggtggtggggagatatacaaaagcctgatcgatcaagtagatacactacatatatctacaatagacatcgagccggaaggtgatgtttactttcctgaaatccccagcaattttaggccagtttttacccaagacttcgcctctaacataaattatagttaccaaatctggcaaaagggttaa

SEQ ID NO: 1462 - DNA, 23 bp, Artificial Sequence
  Synthetic DNA Sequence
gcactcccyaataggaaatacgc

SEQ ID NO: 1463 - DNA, 23 bp, Artificial Sequence
  Synthetic DNA Sequence
agtgttgctcaaaaacaacttcg

SEQ ID NO: 1464 - DNA, 23 bp, Artificial Sequence
  Synthetic DNA Sequence
acgttygaatctatgggmgcact

SEQ ID NO: 1465 - DNA, 23 bp, Artificial Sequence
  Synthetic DNA Sequence
gtcgataagtggagcgtagaggc

SEQ ID NO: 1466 - DNA, 23 bp, Artificial Sequence
  Synthetic DNA Sequence
aagcattgacctacaatcagtgt

SEQ ID NO: 1467 - DNA, 27 bp, Artificial Sequence
  Synthetic DNA Sequence
aatacaactacattgtcatcatttgat

SEQ ID NO: 1468 - DNA, 26 bp, Artificial Sequence
  Synthetic DNA Sequence
cgttacccgctcaggttggacatcaa

SEQ ID NO: 1469 - DNA, 23 bp, Artificial Sequence
  Synthetic DNA Sequence
catccccctctggctcgatgtcg

SEQ ID NO: 1470 - DNA, 474 bp, Escherichia coli
ttgaaagtatcattgatagctgcgaaacgaaaaaacggcgtgattggttgcggtccagacataccgtggtccgcgaaaggggagcagctactttttaaagcattgacctacaatcagtgtcttctggtgggtcgcaagacgtttgaatctatgggcgcactccccaataggaaatacgcggtcgttacccgctcaggttggacatcaaatgatgacaatgtagttgtatttcagtcaatcgaagaggccatggacaggctagctgaattcaccggtcacgttatagtgtctggtggcggagaaatttaccgagaaacattacccatggcctctacgctccacttatcgacgatcgacatcgagccagagggggatgttttcttcccgagtattccaaataccttcgaagttgtttttgagcaacactttacttcaaacattaactattgctatcaaatttggaaaaagggttaa

SEQ ID NO: 1471 - DNA, 26 bp, Artificial Sequence
  Synthetic DNA Sequence
gataatgacaacgtaatagtattccc

SEQ ID NO: 1472 - DNA, 23 bp, Artificial Sequence
  Synthetic DNA Sequence
gctcaatatcaatcgtcgatata

SEQ ID NO: 1473 - DNA, 26 bp, Artificial Sequence
  Synthetic DNA Sequence
ttaaagccttgacgtacaaccagtgg

SEQ ID NO: 1474 - DNA, 26 bp, Artificial Sequence
  Synthetic DNA Sequence
tgggcaatgtttctctgtaaatctcc

SEQ ID NO: 1475 - DNA, 474 bp, Escherichia coli
gtgaaagtatcattaatggctgcaaaagcgaaaaacggagtgattggttgcggtccacacataccctggtccgcgaaaggagagcagctactctttaaagccttgacgtacaaccagtggcttttggtgggccgcaagacgttcgaatctatgggagcactccctaataggaaatacgcggtcgttactcgctcagcctggacggccgataatgacaacgtaatagtattcccgtcgatcgaagaggccatgtacgggctggctgaactcaccgatcacgttatagtgtctggtggcggggagatttacagagaaacattgcccatggcctctacgctccatatatcgacgattgatattgagccggaaggagatgttttctttccgaatattcccaataccttcgaagttgtttttgagcaacactttagctcaaacattaactattgctatcaaatttggcaaaagggttaa

SEQ ID NO: 1476 - DNA, 22 bp, Artificial Sequence
  Synthetic DNA Sequence
ggcgagcagctcctattcaaag

SEQ ID NO: 1477 - DNA, 25 bp, Artificial Sequence
  Synthetic DNA Sequence
taggtaagctaatgccgattcaaca

SEQ ID NO: 1478 - DNA, 26 bp, Artificial Sequence
  Synthetic DNA Sequence
gagaatggagtaattggctctggatt

SEQ ID NO: 1479 - DNA, 25 bp, Artificial Sequence
  Synthetic DNA Sequence
gcgaaatacacaacatcagggtcat

SEQ ID NO: 1480 - DNA, 474 bp, Proteus mirabilis
  strain J120
atgaaaatatctcttatggcagctgtttccgagaatggagtaattggctctggattggatataccttggcatgtacaaggcgagcagctcctattcaaagccatgacttacaatcaatggcttctagttggtcgtaaaaccttcgactcaatgggtaaacttccgaatagaaaatatgcagtggttactcgttctaaaattatctcgaatgaccctgatgttgtgtatttcgcaagtgttgaatcggcattagcttacctaaacaatgcgacagcacatatctttgtttctggtggtggtgaaatatataaagctttaatcgatcaagcagatgttatccatctttcagtgattcacaagcatatctctggcgatgtgttttttcctccagttccacagggcttcaagcaaacatttgagcaaagtttcagttcaaatattgattacacgtaccaaatttgggcaaagggctaa

SEQ ID NO: 1481 - DNA, 24 bp, Artificial Sequence
  Synthetic DNA Sequence
rttacagatcatktatatgtctct

SEQ ID NO: 1482 - DNA, 26 bp, Artificial Sequence
  Synthetic DNA Sequence
taatttatattagacawaaaaaactg

SEQ ID NO: 1483 - DNA, 23 bp, Artificial Sequence
  Synthetic DNA Sequence
carygtcagaaaatggcgtaatc

SEQ ID NO: 1484 - DNA, 26 bp, Artificial Sequence
  Synthetic DNA Sequence
tkcaaagcrwtttctattgaaggaaa

SEQ ID NO: 1485 - DNA, 23 bp, Artificial Sequence
  Synthetic DNA Sequence
aaaatggcgtaatcggtaatggc

SEQ ID NO: 1486 - DNA, 26 bp, Artificial Sequence
  Synthetic DNA Sequence
catttgagcttgaaattcctttcctc

SEQ ID NO: 1487 - DNA, 26 bp, Artificial Sequence
  Synthetic DNA Sequence
aatcgaaaatatgcagtagtgtcgag

SEQ ID NO: 1488 - DNA, 24 bp, Artificial Sequence
  Synthetic DNA Sequence
agactattgtagatttgaccgcca

SEQ ID NO: 1489 - DNA, 474 bp, Escherichia coli
  strain VA292
ttgaaaatttcattgatttctgcaacgtcagaaaatggcgtaatcggtaatggccctgatatcccatggtcagcaaaaggtgagcagttactctttaaagcgctcacatataatcagtggctccttgttggaaggaaaacatttgactctatgggtgttcttccaaatcgaaaatatgcagtagtgtcgaggaaaggaatttcaagctcaaatgaaaatgtattagtctttccttcaatagaaatcgctttgcaagaactatcgaaaattacagatcatttatatgtctctggtggcggtcaaatctacaatagtcttattgaaaaagcagatataattcatttgtctactgttcacgttgaggttgaaggtgatatcaattttcctaaaattccagagaatttcaatttggtttttgagcagttttttttgtctaatataaattacacatatcagatttggaaaaaaggctaa

SEQ ID NO: 1490 - DNA, 25 bp, Artificial Sequence
  Synthetic DNA Sequence
gacctatgagagcttgcccgtcaaa

SEQ ID NO: 1491 - DNA, 26 bp, Artificial Sequence
  Synthetic DNA Sequence
tcgccttcgtacagtcgcttaacaaa

SEQ ID NO: 1492 - DNA, 26 bp, Artificial Sequence
  Synthetic DNA Sequence
cattttagctgccaccgccaatggtt

SEQ ID NO: 1493 - DNA, 25 bp, Artificial Sequence
  Synthetic DNA Sequence
gcgtcgctgacgttgttcacgaaga

SEQ ID NO: 1494 - DNA, 510 bp, Escherichia coli
  strain BL26A
atgatcgagcttcatgccattttagctgccaccgccaatggttgcattgggaaggacaacgcacttccctggccaccactaaaaggcgatctggccagattcaaaaaattgaccatggggaaggtggtcattatggggcgcaagacctatgagagcttgcccgtcaaattagaaggtcgcacctgcatcgttatgacgcgccaagcgctggagcttccgggtgttcgtgacgctaacggcgctatcttcgtgaacaacgtcagcgacgccatgcggttcgctcaagaagagagcgtgggcgatgtggcctacgtcattggtggcgctgagatattcaagcgacttgccttgatgatcacgcagattgaattgacctttgttaagcgactgtacgaaggcgacacctacgttgatctggccgaaatggtcaaagactacgagcagaatggcatggaagaacatgaccttcacacttacttcacttaccgtaaaaaggagcttacagaatga

SEQ ID NO: 1495 - DNA, 24 bp, Artificial Sequence
  Synthetic DNA Sequence
tctctaaacatgattgtcgctgtc

SEQ ID NO: 1496 - DNA, 24 bp, Artificial Sequence
  Synthetic DNA Sequence
cagtgaggcaaaagtttttctacc

SEQ ID NO: 1497 - DNA, 25 bp, Artificial Sequence
  Synthetic DNA Sequence
cggacgacttcatgtggtagtcagt

SEQ ID NO: 1498 - DNA, 26 bp, Artificial Sequence
  Synthetic DNA Sequence
tttgttttcagtaatggtcgggacct

SEQ ID NO: 1499 - DNA, 534 bp, Escherichia coli
atggcttctctaaacatgattgtcgctgtcaataagacaggaggtatcggatttgaaaatcagattccgtggcatgaaccagaagatttaaaacacttcaaagctgttacaatgaactcagttttgattatgggtagaaaaacttttgcctcactgcctaaagtgctgcccggacgacttcatgtggtagtcagtaaaacagtaccacccacccagaacactgatcaagttgtgtatgtaagtacataccagatcgcagtaagaactgcaagcttgttggttgacaaaccagagtattctcaaatttttgtaattggtgggaagagtgcgtacgagaacttagctgcctacgtggacaaactctacttaactagagtacagctcaacacacaacaagacactgaactggatttatccctattcaagtcatggaaactcgtatctgaggtcccgaccattactgaaaacaaaacaaaacttattttccaaatttggattaaccctaaccctattagtgaggaacccacatgttag

SEQ ID NO: 1500 - DNA, 24 bp, Artificial Sequence
  Synthetic DNA Sequence
atcgggttattggcaatggtccta

SEQ ID NO: 1501 - DNA, 25 bp, Artificial Sequence
  Synthetic DNA Sequence
gcggtagttagcttggcgtgagatt

SEQ ID NO: 1502 - DNA, 22 bp, Artificial Sequence
  Synthetic DNA Sequence
gcgggcggagctgagatataca

SEQ ID NO: 1503 - DNA, 26 bp, Artificial Sequence
  Synthetic DNA Sequence
aacggagtgggtgtacggaattacag

SEQ ID NO: 1504 - DNA, 498 bp, Escherichia coli
  strain TKS84
atgaactcggaatcagtacgcatttatctcgttgctgcgatgggagccaatcgggttattggcaatggtcctaatatcccctggaaaattccgggtgagcagaagatttttcgcagactcactgagggaaaagtcgttgtcatggggcgaaagacctttgagtctatcggcaagcctctaccgaaccgtcacacattggtaatctcacgccaagctaactaccgcgccactggctgcgtagttgtttcaacgctgtcgcacgctatcgctttggcatccgaactcggcaatgaactctacgtcgcgggcggagctgagatatacactctggcactacctcacgcccacggcgtgtttctatctgaggtacatcaaaccttcgagggtgacgccttcttcccaatgctcaacgaaacagaattcgagcttgtctcaaccgaaaccattcaagctgtaattccgtacacccactccgtttatgcgcgtcgaaacggctaa

SEQ ID NO: 1505 - DNA, 24 bp, Artificial Sequence
  Synthetic DNA Sequence
atttttcgcaggctcaccgagagc

SEQ ID NO: 1506 - DNA, 27 bp, Artificial Sequence
  Synthetic DNA Sequence
cggatgagacaacctcgaattctgctg

SEQ ID NO: 1507 - DNA, 498 bp, Escherichia coli
  strain RA33.2
atgaacccggaatcggtccgcatttatctggtcgctgccatgggtgccaatcgggttattggcaatggtcccgatatcccctggaaaatcccaggtgagcagaagatttttcgcaggctcaccgagagcaaagtggtcgttatgggccgcaagacatttgagtccataggcaagcccttaccaaaccgccacacagtggtgctctcgcgccaagctggttatagcgctcctggttgtgcagttgtttcaacgctgtcacacgtatcgccatcgacagccgaacacggcaaagaactctacgtagcgcgcggagccgaggtatatgcgctggcgctaccgcatgccaacggcgtctttctatctgaggtacatcaaacctttgagggtgacgccttcttcccagtgcttaacgcagcagaattcgaggttgtctcatccgaaaccattcaaggcacaatcacgtacacgcactccgtctatgcgcgtcgtaacggctaa

SEQ ID NO: 1508 - DNA, 27 bp, Artificial Sequence
  Synthetic DNA Sequence
agaatgtattggtatttccatctatcg

SEQ ID NO: 1509 - DNA, 26 bp, Artificial Sequence
  Synthetic DNA Sequence
caatgtcgattgttgaaatatgtaaa

SEQ ID NO: 1510 - DNA, 22 bp, Artificial Sequence
  Synthetic DNA Sequence
tggagtgccaaaggggaacaat

SEQ ID NO: 1511 - DNA, 27 bp, Artificial Sequence
  Synthetic DNA Sequence
cagacacaatcacatgatccgttatcg

SEQ ID NO: 1512 - DNA, 474 bp, Escherichia coli
  strain UI14
gtgaaactatcactaatggcagcaatttcgaagaatggagttatcggaaatggcccagatattccatggagtgccaaaggggaacaattactcttcaaagcgattacctataatcagtggcttttggtaggccgaaagactttcgagtcaatgggggctttacccaaccgaaaatatgccgttgtaactcgttcaagcttcacttccagtgatgagaatgtattggtatttccatctatcgatgaagcgctaaatcatctgaagacgataacggatcatgtgattgtgtctggtggtggtgaaatatacaaaagcctgatcgataaagttgatactttacatatttcaacaatcgacattgagccagaaggtgatgtctattttccagaaatccccagtagttttaggccagtttttagccaagacttcgtgtctaacataaattatagttaccaaatctggcaaaagggttaa

SEQ ID NO: 1513 - DNA, 23 bp, Artificial Sequence
  Synthetic DNA Sequence
ttcaagctcaaatgaaaacgtcc

SEQ ID NO: 1514 - DNA, 25 bp, Artificial Sequence
  Synthetic DNA Sequence
gaaattctcaggcattatagggaat

SEQ ID NO: 1515 - DNA, 23 bp, Artificial Sequence
  Synthetic DNA Sequence
gtggtcagtaaaaggtgagcaac

SEQ ID NO: 1516 - DNA, 26 bp, Artificial Sequence
  Synthetic DNA Sequence
tctttcaaagcattttctattgaagg

SEQ ID NO: 1517 - DNA, 474 bp, Escherichia coli
  strain EC107
ttgaaaatatcattgatttctgcagtgtcagaaaatggcgtaatcggtagtggtcctgatatcccgtggtcagtaaaaggtgagcaactactctttaaagcgctcacatataatcaatggctccttgtcggaagaaaaacatttgactctatgggtgttcttccaaatcgcaaatatgcagtagtgtcaaagaacggaatttcaagctcaaatgaaaacgtcctagtttttccttcaatagaaaatgctttgaaagagctatcaaaagttacagatcatgtatatgtctctggcgggggtcaaatctataatagccttattgaaaaagcagatataattcatttgtctactgttcacgttgaagtcgaaggtgatatcaaattccctataatgcctgagaatttcaatttggtttttgaacagttttttatgtctaatataaattatacataccagatttggaaaaaaggctaa

SEQ ID NO: 1518 - DNA, 125 bp, Acinetobacter lwoffi
  strain CDCF 3697
ctatgtctcaaggccgtgcaacatactctatggaatttgctaaatatgctgaaactccacgtaacgtggctgaaggcatcatttctaaatttcagtctggcggtaaaaaaggtgacgacgagtaa

SEQ ID NO: 1519 - DNA, 93 bp, Acinetobacter lwoffii
  strain CDCF 3697
tctttcgattactataagcccaaactaattcatagttaaaaaccaagtgctcatgcagtgatcctgcatgagtagtttaaaaaggaagatctc

SEQ ID NO: 1520 - DNA, 1106 bp, Acinetobacter lwoffii
  strain CDCF 3697
atggctaaggctaagtttgaacgtaataagccacacgttaacgtgggcacaatcggtcacgttgaccatggtaaaacaactttaacagctgcaattgcaactgtatgtgcgaagaaattcggtggcgaagcgaaagactacgctgcaattgactctgcaccagaagaaaaagcacgtggtattacaattaatacttcacacgtagaatacgattctccaactcgtcactacgcacacgtagactgcccgggccacgccgattatgttaaaaacatgattactggtgctgctcagatggacggcgcgatccttgtatgtgctgcgactgatggtccaatgccacagactcgtgaacacatccttctttctcgtcaggttggtgtaccttacattcttgtattccttaacaagtgtgaccttgttgatgatgaagaacttcttgagctagtggaaatggaagttcgtgaacttctttctacttatgacttcccaggtgatgacactccagttatccgtggttcagctcttcttgcacttaacggtgacgctggtcagtatggcgaagaagcagttgttgcgcttgttgacgcacttgacacttacattccagagccagtacgtgcaatcgaccaagcattcttaatgccaatcgaagacgtattctctatttctggtcgtggtacagtagtaactggccgtgtagaaactggtattgtgaaagtaggcgaatcagttgaaatcgttggtatccgtgatactcaagtaactacagttactggcgtagaaatgttccgtaaattgcttgacgaaggtcgtgcgggcgagaactgtggtgttcttctacgtggtactaagcgtgaagacgtacaacgtggtcaagtacttgctaaaccaggtgcaatcaagccacacactaaattcgatgcagaagtatacgtactttctaaagaagaaggtggtcgtcacactccattccttaacggttaccgtccacagttctacttccgtacaactgacgtaactggcgcgatcaaattacaagatggcgttgaaatggttatgcctggtgacaacgtagaaatgtcagtagaattaatccacccaat

SEQ ID NO: 1521 - DNA, 100 bp, Haemophilus influenzae
  ref <308>: DATABASE ACCESSION NUMBER: ATCC 9006
acaaactcaaggtcgtgcatcttactcaatggaaccgttaaaatatgctgaagctccaacaagtgttgcggctgcagtaattgaagcgcgtaaaaaataa

SEQ ID NO: 1522 - DNA, 64 bp, Haemophilus influenzae
  ref <308>: DATABASE ACCESSION NUMBER: ATCC 9006
tttttgtaaaccagcggtgtaaaatatgattgttttataccgcacttcttaggaaacattagaa

SEQ ID NO: 1523 - DNA, 1098 bp, Haemophilus influenzae
  ref <308>: DATABASE ACCESSION NUMBER: ATCC 9006
atgtctaaagaaaaatttgaacgtacaaaaccgcacgtaaacgtgggtacaatcggccacgttgaccacggtaaaacaactttaacagcagcaattacaaccgtattagcaaaacactacggtggtgcagcgcgtgcatttgaccaaatcgataacgcgccagaagaaaaagcgcgtggtattaccatcaacacttcacatgttgaatacgatacaccaactcgccactatgcacacgtagactgtccaggacacgccgactatgttaaaaacatgattaccggtgcggcgcaaatggatggtgctattttagtagtagcagcaacagatggtcctatgccacaaactcgtgaacatatcttattaggtcgccaagtaggtgttccatacatcatcgtattcttaaacaaatgcgacatggtagatgatgaagagttattagaattagtagaaatggaagtgcgtgaacttctatctcaatatgacttcccaggtgacgatacaccaatcgtacgtggttcagcattacaagcattgaacggcgtagcagaatgggaagaaaaaatccttgaattagctggtcacttagatacttacatcccagaaccagaacgtgcgattgaccaaccgttccttcttccaattgaagacgtattctcaatttcaggtcgtggtacagtagtaactggtcgtgtagaacgtggtatcatccgtactggtgatgaagtagaaatcgtcggtatcaaagatacagcgaaaactactgtaacaggtgttgaaatgttccgtaaattacttgacgaaggtcgtgcaggtgaaaacatcggtgcattattacgtggtaccaaacgtgaagaaatcgaacgtggtcaagtattagcgaaaccaggttcaatcacaccacacactgattttgaatcagaagtatacgtattatcaaaagatgaaggtggtcgtcatactccattcttcaaaggttaccgtccacaattctatttccgtacaacagacgtaactggtacaattgaattaccagaaggcgtggaaatggtaatgccaggcgataacatcaagatgacagtaagcttaatccaccca

SEQ ID NO: 1524 - DNA, 77 bp, Proteus mirabilis
  ref <308>: DATABASE ACCESSION NUMBER: ATCC 25933
caatggagttcttgaagtacaacgaagcgcctagcaacgtcgctcaggctattatcgaagctcgtaaagcgaaataa

SEQ ID NO: 1525 - DNA, 67 bp, Proteus mirabilis
  ref <308>: DATABASE ACCESSION NUMBER: ATCC 25933
gatcctttcgagttcaatttagtttacgctccctctgtgagagggagcgatattaaggaatatagtc

SEQ ID NO: 1526 - DNA, 1112 bp, Proteus mirabilis
  ref <308>: DATABASE ACCESSION NUMBER: ATCC 25933
gtgtctaaagaaaaatttgaacgttcaaaaccgcacgttaacgttggtactatcggccacgttgaccacggtaaaacaactctgactgctgcaatcactacagttttagctaaaacttacggtggtgctgctcgtgcattcgaccaaatcgataatgcaccagaagaaaaagcgcgtggtatcaccatctctacttcacacgtagaatacgatactccaactcgccactacgcacacgtagactgcccaggtcacgccgactatgttaaaaacatgatcactggtgctgcgcaaatggacggcgctattctggtagtagcagcaactgatggtccaatgccacaaactcgtgagcacatcctgttaggtcgtcaggttggtgttccttacatcatcgtattcctgaacaaatgtgacatggtagatgatgaagagctgttagaattagttgaaatggaagttcgtgaacttctgtctcaatacgatttcccaggtgatgacactccagtaatccgtggttcagcgctgaaagcactggaaggcgaagcagagtgggaagcaaaaattgttgaattagcagaagcactggattcttatatcccagagccagagcgtgcaattgacaaaccattcctgttaccaatcgaagatgtattctcaatctcaggccgtggtacagtagttactggtcgtgtagagcgtggtatcatcaaagtaggtgatgaagttgagattgttggtatcaaagaaaccaccaaaacaacttgtactggcgttgaaatgttccgtaaattacttgacgaaggtcgtgcaggtgagaacgtaggtgttctgctgcgtggtacaaaacgtgaagaaatcgaacgtggacaagtactggcaaaaccaggctcaatcaacccacacaacaaatttgaatcagaagtttatattctgagcaaagatgaaggtggtcgtcacacaccattcttcaaaggctaccgtccacagttctacttccgtacaactgacgtaactggtactatcgaattaccagaaggcgtagaaatggtaatgccaggcgacaacgtgaacatgatcgttgaactgatccacccaatcgcaatggacga

SEQ ID NO: 1527 - DNA, 800 bp, Campylobacter curvus
  ref <308>: DATABASE ACCESSION NUMBER: ATCC 35224
atcaacgaagctatcgaggtttattttgaggttgagggcaagaaaaatagattgatcctggaggtcgcggctcacttgggtgataaccgcgtcagaacgatcgctatggatatgagtgaggggcttactcgcgggcttgaagctaccgctcttggtgcgcctattagtgtgccggttggcgagaaggttttgggaagaatttttaacgtcgtcggcgatctcatcgacgagggcgagggcgtaaattttgataaacattggtctatccaccgcgatccgccaccatttgaagaacaaagcacgaaaagtgaaatttttgaaaccggtataaaggttgtggatcttcttgcgccttacgcaaagggcggtaaggtcggactatttggcggtgcaggtgtcggtaaaacggtcatcatcatggagctcatccacaatgtcgccttcaaacacagcggatactctgtatttgcaggtgttggcgagaggacgcgcgaaggaaacgacctttatcacgagatgaaagaaagtaacgttttggataaagtcgccttgtgctacggacagatgaacgagccgccaggggcgagaaatcgtatcgcactgactggtctaacgatggctgagtatttccgcgatgagatgggacttgatgtgcttatgtttatcgacaacatcttccgcttctctcaatctggtgcagagatgtcggcactcctcggacgtatcccatcagccgttggttaccagccgacgctggcaagcgagatgggtaaatttcaagaaaggatcacatcgactaa

SEQ ID NO: 1528 - DNA, 26 bp, Artificial Sequence
  Synthetic DNA Sequence
aacttgagcgattttcggataccctg

SEQ ID NO: 1529 - DNA, 24 bp, Artificial Sequence
  Synthetic DNA Sequence
ttgccgatgaaataaccgccgact

SEQ ID NO: 1530 - DNA, 1035 bp, Escherichia coli
atgcgattggtttggaaatgtggggcgattcaggcatcccggttatctgaatggctcaactcaacagccggtgctcatgaacttgagcgattttcggataccctgaccttttctgtgtatggctcagtgctgatctggctgaaatcatatctccgcgaatcaggaagaaaactgcagttagtcggaatcgccttacccaacaccctgaacccaagggacgacctagcgcaattggccgaaattatccagctcatcgatcacctcatgaaaccgcacgttgatatgttgactcacttgttggcgtccattgatggccagtcggcggttatttcatcggcaaaatggggggagctagaaacggctcggcaggagaaagctatctcaggggtaaccagattgaagctccgcttggcgtcgcttgcccccgtcctgaaaaaacacgtcaacagcgatttgttccgaaaagcctctgatcgaatagagtcgatagagtatacgttggaaaccttgcgtataatgaaaactttcttcgatggtacctctcttgagggagatacttccgtacgtgactcgtatatggcgggcgtagtagatggaatggttcgagcgaatccggatgtgaagataattctgctggcgcacaacaatcatctacaaaaaactccagtctccttttcaggcgagcttacggctgttcccatggggcagcacctcgcagagagggtgaattaccgtgcgattgcattcacccatcttggacccaccgtgccggaaatgcatttcccatcgccaaaaagtcctcttggattctctgttgtgaccacgcctgccgatgcaatccgtgaggatagtatggaacagtatgtcatcgacgcctgtggtacggagaattcatgtctgacattgacagatgcccccatggaagcaaagcgaatgcggtctcaaagcgcctctgtagaaacgaaattgagcgaggcatttgatgccatcgtctgtgttacaagcgccggcaaggacagcctggttgccctatag

SEQ ID NO: 1531 - DNA, 25 bp, Artificial Sequence
  Synthetic DNA Sequence
tctttttgttacgacatacgctttt

SEQ ID NO: 1532 - DNA, 24 bp, Artificial Sequence
  Synthetic DNA Sequence
agtgcttctttatccgctgttcta

SEQ ID NO: 1533 - DNA, 26 bp, Artificial Sequence
  Synthetic DNA Sequence
cagcggataaagaagcactacacatt

SEQ ID NO: 1534 - DNA, 23 bp, Artificial Sequence
  Synthetic DNA Sequence
cctcctgaaataaagcccgacat

SEQ ID NO: 1535 - DNA, 1260 bp, Escherichia coli
  misc_feature (1)...(1260): n=a,t,c or g
atgaggttcgaagaatgggtcaaagataagcatattccttncaaacngaatcaccctgatgataattacgatgattttaagccattaagaaanataattggagatacccgagttgtagcattaggtgaaaattctcatttcataaaagaattctttttgttacgacatacgcttttgcgtttttttatcgaagatctaggttttactacgtttgcttttgaatttggttttgctgagggtcaaatcatcaataactggatacatggacaaggaactgacgatgaaataggcagattcttaaaacacttctattatccagaagagctcaaaaccacatttctatggctaagggagtacaataaagcagcaaaagaaaaaatcacatttcttggcattgatatacccagaaatggaggttcatacttaccaaatatggagatagtgcatgacttttttagaacagcggataaagaagcactacacattatcgatgatgcatttaatattgcaaaaaagattgattacttctccacatcacaggcagccttaaatttacatgagctaacagattctgagaaatgccgtttaactagccaattagctcgagtaaaagttcgccttgaagctatggctccaattcacattgaaaaatatgggattgataaatatgagacaattctgcattatgccaacggtatgatatacttggactataacattcaagctatgtcgggctttatttcaggaggcggaatgcagggcgatatgggtgcaaaagacaaatacatggcagattctgtgctgtggcatttaaaaaacccacaaagtgagcagaaagtgatagtagtagcacataatgcacatattcaaaaaacacccattctgtatgatggatttctaagttgcctaccaatgggccaaagacttaaaaatgccattggtgatgattatatgtctttaggtattacttcttatagtgggcatactgcagccctctatccggaagttgatacaaaatatggttttcgagttgataacttccaactgcaggaaccaaatgaaggttctgtcgagaaagctatttctggttgtggagttactaattcttttgtcttttttagaaatattcctgaagatttacaatccatcccgaacatgattcgatttgantctatttacatgaaagcagaactcgagaaagctttcgatggaatatttcaaattgaaaagtcatctgtatctgaggtcgtttatgaataa

SEQ ID NO: 1536 - DNA, 25 bp, Artificial Sequence
  Synthetic DNA Sequence
agatgtattaactggaaaacaacaa

SEQ ID NO: 1537 - DNA, 25 bp, Artificial Sequence
  Synthetic DNA Sequence
ctttgtaattagtttctgaaaacca

SEQ ID NO: 1538 - DNA, 28 bp, Artificial Sequence
  Synthetic DNA Sequence
ttagaagatataggatacaaaatagaag

SEQ ID NO: 1539 - DNA, 22 bp, Artificial Sequence
  Synthetic DNA Sequence
gaatgaaaaagaagttgagctt

SEQ ID NO: 1540 - DNA, 486 bp, Staphylococcus haemolyticus
atgaaaaataataatgtaacagaaaaagaattattttatattttagatttatttgaacacatgaaagtaacttattggttagatggtggctggggggtagatgtattaactggaaaacaacaaagagaacacagagatatagatatagattttgacgctcaacacactcaaaaagttatacaaaaattagaagatataggatacaaaatagaagttcattggatgccttcacgtatggaacttaagcatgaagaatatgggtatttagatattcatcctataaatctaaatgatgatggatcaattacccaagcaaacccagaaggtggtaattatgttttccaaaatgactggttttcagaaactaattacaaagatcgaaaaataccatgtatttcaaaagaagctcaacttctttttcattctggttatgatttaacagaaacagaccattttgatataaaaaatttaaaatcaataacataa

SEQ ID NO: 1541 - DNA, 25 bp, Artificial Sequence
  Synthetic DNA Sequence
tgataatcttatacgtggggaattt

SEQ ID NO: 1542 - DNA, 26 bp, Artificial Sequence
  Synthetic DNA Sequence
ataattttctaattgccctgtttcat

SEQ ID NO: 1543 - DNA, 26 bp, Artificial Sequence
  Synthetic DNA Sequence
gggcaattagaaaattatttatcaga

SEQ ID NO: 1544 - DNA, 26 bp, Artificial Sequence
  Synthetic DNA Sequence
ttttactcatgtttagccaattatca

SEQ ID NO: 1545 - DNA, 804 bp, Enterococcus faecium
atgttaaaacaaaaagaattaattgcaaacgttaagaatcttactgagtcagatgaacgaattacagcttgtatgatgtatggatcgtttaccaaaggagaaggtgaccaatactctgatatagagttctatatatttttgaaacatagtataacctcgaactttgattcatccaactggttgtttgacgtagctccgtacttgatgctttataaaaatgagtacggaacagaggtagttatttttgataatcttatacgtggggaatttcatttcctttctgaaaaagatatgaacataatcccctcgtttaaagattcaggttatattcctgatacgaaggctatgcttatttacgatgaaacagggcaattagaaaattatttatcagagataagtggtgcaagaccaaatagacttactgaagaaaatgctaattttttgttgtgtaatttctctaatctatggttgatgggaatcaacgttctaaaaagaggagaatatgctcgttcattagaactcttatcacaacttcaaaaaaatacactacaacttatacgtatggcagaaaaaaatgctgataattggctaaacatgagtaaaaaccttgaaaaagaaattagccttgaaaattataaaaaatttgcaaagaccactgctcgattagataaggtagaattatttgaagcctataaaaattctttgctattagttatggatttgcaaagtcaccttattgaacaatacaacttaaaagttacacatgacattttagaaagattgttgaattacattagtgaatag

SEQ ID NO: 1546 - DNA, 22 bp, Artificial Sequence
  Synthetic DNA Sequence
caagaaggaatggctgtactac

SEQ ID NO: 1547 - DNA, 27 bp, Artificial Sequence
  Synthetic DNA Sequence
taattcccaaataaccctaataataga

SEQ ID NO: 1548 - DNA, 1218 bp, Streptococcus pyogenes
atggaaaaatacaacaattggaaacttaagttttatacaatatgggcagggcaagcagtatcattaatcactagtgccatcttgcaaatggcgattattttttaccttacagaaaaaactggatccgcgatggtcttgtctatggcttcactattaggttttttaccctatgcggtctttggacctgcaattggtgtgctagtggatcgtcatgataggaagaagataatgattggtgctgatttaattatcgcagcagctggttcggtgcttactattgttgcattctatatggagctacctgtctggatggttatgatagtattgtttatccgtagcattggaacagcttttcacaccccggctctcaatgcggttacgccacttttagtaccagaagaacagcttacgaaatgtgcaggctatagtcagtctttgcagtctataagctatattgttagtccggcggttgcagcactcttatactccgtttgggaactaaatgctattattgccatcgatgtattgggtgctgtgattgcatctattacggtagcaattgtacgtattcctaagctgggtgatcgcgtgcaaagtttggacccaaatttcataagagaaatgcaagaaggaatggctgtactacggcaaaataaaggattatttgctttattactcgttggaacattatatatgtttgtttatatgccaattaatgcactattccctttaattagcatggattactttaatggaacacctgtgcatatttctattacggaaatttcctttgcatctggaatgttgatagggggtctattattagggttatttgggaattaccaaaagcgaatcttattaataacggcatccatttttatgatggggataagcttaaccatttcaggattacttccccaaagtggatttttcatttttgtagtctgctgtgcaataatggggctttctgttccgttttacagcggtgtgcaaacagctctttttcaggagaaaattaagcctgaatatttaggacgtgtattttctttaactggaagtatcatgtctcttgctatgccaattggattaattctttctgcactctttgctgatagaatcggtgtaaatcattggtttttactatcaggtactttaattatttgcattgcaatagtttgcccaatgataaatgagattagaaaattagatttaaaataa

SEQ ID NO: 1549 - DNA, 26 bp, Artificial Sequence
  Synthetic DNA Sequence
gcttattattaggaagattagggggc

SEQ ID NO: 1550 - DNA, 24 bp, Artificial Sequence
  Synthetic DNA Sequence
tagcaagtgacatgatacttccga

SEQ ID NO: 1551 - DNA, 1218 bp, Streptococcus pneumoniae
atggaaaaatacaacaattggaaacgaaaattttatgcaatatgggcagggcaagcagtatcattaatcactagtgccatcctgcaaatggcgattattttttaccttacagaaaaaacaggatctgcgatggtcttgtctatggcttcattagtaggttttttaccctatgcgattttgggacctgccattggtgtgctagtggatcgtcatgataggaagaagataatgattggtgccgatttaattatcgcagcagctggtgcagtgcttgctattgttgcattctgtatggagctacctgtctggatgattatgatagtattgtttatccgtagcattggaacagcttttcataccccagcactcaatgcggttacaccacttttagtaccagaagaacagctaacgaaatgcgcaggctatagtcagtctttgcagtctataagctatattgttagtccggcagttgcagcactcttatactccgtttgggatttaaatgctattattgccatcgacgtattgggtgctgtgattgcatctattacggtagcaattgtacgtatacctaagctgggtaatcaagtgcaaagtttagaaccaaatttcataagggagatgaaagaaggagttgtggttctgagacaaaacaaaggattgtttgccttattactcttaggaacactatatacttttgtttatatgccaatcaatgcactatttcctttaataagcatggaacactttaatggaacgcctgtgcatatttctattacggaaatttcctttgcatttgggatgctagcaggaggcttattattaggaagattagggggcttcgaaaagcatgtattactaataacaagttcattttttataatggggaccagtttagccgtttcgggaatacttcctccaaatggatttgtaatattcgtagtttgctgtgcaataatggggctttcggtgccattttatagcggtgtgcaaacagctctttttcaggagaaaattaagcctgaatatttaggacgtgtattttctttgatcggaagtatcatgtcacttgctatgccaattgggttaattctttctggattctttgctgataaaatcggtgtaaatcattggtttttactatcaggtattttaattattggcattgctatagtttgccaaatgataactgaggttagaaaattagatttaaaataa

SEQ ID NO: 1552 - DNA, 24 bp, Artificial Sequence
  Synthetic DNA Sequence
ggcaagcagtatcattaatcacta

SEQ ID NO: 1553 - DNA, 26 bp, Artificial Sequence
  Synthetic DNA Sequence
caatgctacggataaacaatactatc

SEQ ID NO: 1554 - DNA, 27 bp, Artificial Sequence
  Synthetic DNA Sequence
agaaaattaagcctgaatatttaggac

SEQ ID NO: 1555 - DNA, 25 bp, Artificial Sequence
  Synthetic DNA Sequence
tagtaaaaaccaatgatttacaccg

SEQ ID NO: 1556 - DNA, 25 bp, Artificial Sequence
  Synthetic DNA Sequence
actgtacgcacttgcagcccgacat

SEQ ID NO: 1557 - DNA, 24 bp, Artificial Sequence
  Synthetic DNA Sequence
gaacggcaggcgattcttgagcat

SEQ ID NO: 1558 - DNA, 22 bp, Artificial Sequence
  Synthetic DNA Sequence
gtggtggtgcatggcgatctct

SEQ ID NO: 1559 - DNA, 24 bp, Artificial Sequence
  Synthetic DNA Sequence
gccgcagcgaggtactcttcgtta

SEQ ID NO: 1560 - DNA, 906 bp, Escherichia coli
atgaccgtagtcacgaccgccgatacctcccaactgtacgcacttgcagcccgacatgggctcaagctccatggcccgctgactgtcaatgagcttgggctcgactataggatcgtgatcgccaccgtcgacgatggacgtcggtgggtgctgcgcatcccgcgccgagccgaggtaagcgcgaaggtcgaaccagaggcgcgggtgctggcaatgctcaagaatcgcctgccgttcgcggtgccggactggcgcgtggccaacgccgagctcgttgcctatcccatgctcgaagactcgactgcgatggtcatccagcctggttcgtccacgcccgactgggtcgtgccgcaggactcggaggtcttcgcggagagcttcgcgaccgcgctcgccgccctgcatgccgtccccatttccgccgccgtggatgcggggatgctcatccgtacaccgacgcaggcccgtcagaaggtggccgacgacgttgaccgcgtccgacgcgagttcgtggtgaacgacaagcgcctccaccggtggcagcgctggctcgacgacgattcgtcgtggccagatttctccgtggtggtgcatggcgatctctacgtgggccatgtgctcatcgacaacacggagcgcgtcagcgggatgatcgactggagcgaggcccgcgttgatgaccctgccatcgacatggccgcgcaccttatggtctttggtgaagaggggctcgcgaagctcctcctcacgtatgaagcggccggtggccgggtgtggccgcggctcgcccaccacatcgcggagcgccttgcgttcggggcggtcacctacgcactcttcgccctcgactcgggtaacgaagagtacctcgctgcggcgaaggcgcagctcgccgcagcggaatga

SEQ ID NO: 1561 - DNA, 1048 bp, Candida albicans
  ref <308>: DATABASE ACCESSION NUMBER: ATCC 18804
gatcatggtaaaactacattgactgctgctatcaccaaagttttagccgaacaaggtggtgccaacttcttggattayggttctattgatagagctccagaagaaagagctagaggtatcactatttccactgcccacgttgaatacgaaaccaagaacagacactatgcccacgttgattgtccaggacacgctgattatatcaaaaatatgattactggtgccgctcaaatggatggtgctatcattgttgttgctgccactgatggtcaaatgcctcaaaccagagaacatttgttattggccagacaagttggtgttcaagacttggttgtgtttgtcaacaaagtcgatactattgatgaccctgaaatgttggaattagtcgaaatggaaatgagagaattgttatccacctacggttttgatggtgacaacactccagttattatgggatctgctttaatggctttggaagacaagaaaccagaaattggtaaggaagctatcttgaaattgttagatgctgtcgatgaacacattccaactccatcaagagacttggaacaaccatttttgttaccagttgaagacgtgttctccatctccggtagaggaactgttgtcactggtagagttgaaagaggtgttttgaagaagggtgaagaaatcgaaattgttggtggttttgacaaaccttacaagactactgttaccggtattgaaatgttcaaaaaagaattagactctgctatggctggtgacaactgtggtgttttgttaagaggtgttaaaagagatgaaatcaagagaggtatggttttggccaaaccaggtactgccacttctcacaagaagttcttggcttccttgtatattttgacttccgaagaaggtggycgttccactccatttggtgaaggttacaagcctcaatgcttcttcagaactaacgatgtcactaccacattttcattcccagaaggagaaggtgttgaccattctcaaatgatcatgccaggtgacaacattgaaatggttggtgaat

SEQ ID NO: 1562 - DNA, 1074 bp, Candida dubliniensis
  strain NCPF 3949
tgatcacggtaaaaccacattaactgctgccattaccaaagtattagctgaacaaggtggtgccaactttttggattacggttccattgatagagctccagaagaaagagccagaggtatcactatttccactgcccacgttgaatacgaaaccaagaacagacactatgcccacgttgattgtccaggacacgctgattatatcaaaaacatgattactggtgctgctcaaatggatggtgctatcattgttgttgctgctactgacggtcaaatgccacaaaccagagaacatttattgttggcaagacaagttggtgttcaagacttggttgtctttgtcaacaaagttgatactattgatgaccctgagatgttggaattagtcgaaatggaaatgagagaattgttgtccacctacggttttgatggtgacaacactcctgttattatgggatctgctttaatggccttggaaggcaaaaaaccagaaattggtaaggaagctattttgagattgttagatgctgtcgatgaacacattccaactccatcaagagacttggaacaaccatttttgttgccagttgaagacgtgttctccatctctggtagaggaactgttgtcaccggtagagttgaaagaggtgtcttgaagaagggtgaagaaatcgaaattgttggtggttttgacaaaccatacaagaccactgttactggtattgaaatgttcaaaaaggaattagattctgctatagctggtgacaactgtggtgttttgttgagaggtgttaaaagagatgaaatcaagagaggtatggttttggccaagccaggtactgctacttctcacaagaaatttttagcatctttgtatattttgacttcagaagaaggtggtcgttccactccatttggagaaggttacaagcctcaatgtttcttcagaactaatgacgtcactaccacattttcattcccagaaggagaaggtgttgaccactcccaaatggtcatgccaggtgataacattgaaatggttggtgaattgatcaaatcatgtccattggaagt

SEQ ID NO: 1563 - DNA, 1033 bp, Candida famata
  ref <308>: DATABASE ACCESSION NUMBER: ATCC 62894
gatcacgggaagactactttgaccgctgccatcaccaaagttttagccgaaaaaggtggtgctaacttcttggactacggttctatcgataaagctccagaagaaagagccagaggtattactatttctgctgcccatgttgaatacgaaactgacaagagacactatgcccatgttgattgtccaggtcacgcagattatatcaagaatatgattactggtgctgctcaaatggatggtgccattattgttgttgctgcttccgatggtcaaatgcctcaaaccagagaacatttgttattggccagacaagttggtgttcaacacttggttgttttcgtcaacaaggtcgacaccattgacgatccagaaatgttggaattggttgaaatggaaatgagagatttgttaactacttacggttttgatggtgataacaccccagttatcatgggatctgctttgtgtgctttggaatccagagaaccagaaattggtcaaaaagccattgaaaaattgttagatgccgtcgatgaatacattccaaccccagtcagagacttggaacaaccattcttgatgccagttgaagaagttttctccatttccggtagaggtaccgttgttgctggtagagtcgaaagaggtaccttgaagaagggtgaagaaatcgaaattgttggtggtttcgacaagccattcaaggccactgttactggtattgaaatgttcaagaaggaattggactccgctcttgctggtgacaactgtggtatcttgttgagaggtgtcaagagagacgaagttaagagaggtatggtcttgaccaagccaaacaccgtcacttcccacaagaagatcttggcctcgttgtatatcttgaccaaggaagaaggtggtagacactctccatttggagccaactacaagccccaattgttcatgagaaccaccgatgttaccggtaccatgaccttcccagaaggtgccgaccaatctgccatggtcatgccaggtgacaacgttgaaatgc

SEQ ID NO: 1564 - DNA, 1056 bp, Candida glabrata
  ref <308>: DATABASE ACCESSION NUMBER: ATCC 66032
gatcacggtaagactacattgacagctgctatcaccaagacattggccaagaacggtggtgctgatttcttggactactcttccattgacaaagctccagaggagagagcccgtggtatcactatctctactgcccatgtcgagtacgagaccgccaagagacattactcccacgtcgactgtccaggtcacgccgactacatcaagaacatgattactggtgctgcccaaatggacggtgctatcatcgttgtcgccgccaccgatggtcaaatgccacaaactagagagcatttgctgttggccagacaagtcggtgttcaacgtatcgttgtctttgtcaacaaggtggacaccatcgatgaccctgaaatgttggaattagtggaaatggaaatgagagaattgttgaacgaatacggttttgacggtgacaatgcccctatcattatgggttccgctttgtgtgccctagaaggtcgtcaacctgaaattggtgagcaagctatcatgaaactattggacgctgttgatgaatacattccaaccccagaaagagacttgaacaagccattcttgatgcctgttgaagacatcttctccatctctggtagaggtaccgtcgtcactggacgtgtcgaaagaggtaacttgaagaagggtgaagaagttgaaattgttggtcacaacactaccccattgaagaccaccgttactggtatcgaaatgttcagaaaggaattggaccaagctatggctggtgacaacgccggtatcctattgagaggtatcagaagagaccaattgaagagaggtatggtcatggccaagccaggtaccgtcaaggctcacaccaagattttggcttctttgtacatcttgtctaaggaagaaggtggtagacattctggtttcggtgaaaactacagacctcagatgtttatcagaaccgcagatgtcactgttgtgatgaagttcccagaatctgtggaagaccactctatgcaagttatgccaggtgacaacgtcgaaatggtctgtgaactagtccaccca

SEQ ID NO: 1565 - DNA, 1061 bp, Candida guilliermondii
  ref <308>: DATABASE ACCESSION NUMBER: ATCC 6260
gatcatggtaagaccactttgaccgctgctatcaccaaggttttgtcggaaaaaggaggtgctaatttcttggattacggctccatcgacagagctccagaagagagagccagaggtatcaccatttccactgcccatgttgagtaccaaactgataagagacattatgcccacgttgactgtccaggtcacgccgattacattaagaatatgattactggtgccgcccagatggacggtgccattattgttgttgctgccactgacggtcaaatgcctcagaccagagagcacttgttgttggccagacaagttggtgtgcaacacttggtagtttttgtgaacaaggtggacaccattgacgatcccgagatgttggaattggtcgagatggaaatgagagaattgttgagtcagtacggtttcgatggtgacaacaccccagttatcatgggatctgctttgtgtgctttggaaagtaagcagccagaaattggtgtgcaagccattgaaaaattgttggacgctgtcgatgagcacattcctactcctacccgtgacttggaacagccattcttgttgcctgttgaagatgtgttctccatttctggtagaggaactgtggttactggtagagtcgaaagaggttcgttgaagaagggtgaggaaatcgagattgttggtgactttgacaagccattcaagaccactgtgactggaattgaaatgttcaagaaggaattggatgctgctatggctggtgacaatgctggtatcttgttgagaggtgtcaagagagacgatgtcaagagaggtatggttttggccaagccttccaccgtcacttctcacaagaaggtgttggcttccttgtacatcttgagtaaggaagaaggtggccgtcactctccttttggtgagaactacaagcctcaattgttcatcagaactactgacgttaccggtactttaagattcccagccggcgagggtgtcgaccactcgcaaatggttatgccaggtgacaatgttgagatggaaattgagcttgtgagaaagac

SEQ ID NO: 1566 - DNA, 1073 bp, Candida haemulonii
  ref <308>: DATABASE ACCESSION NUMBER: ATCC 22991
gatcacggtaagactaccttgactgctgctatcaccaaggttttggcttctaagggtggtgctagcttcttggactatggttccattgacagagccccagaggagagagctagaggtattactatttctactgcccacgttgagtaccaaaccgaaaagagacactacgcccacgtcgactgtccaggtcacgctgattacattaagaatatgattactggtgccgcccagatggacggtgctatcattgttgttgctgcttctgatggtcagatgcctcagaccagagagcaccttttgttggccagacaggttggtgttcagaacttggttgttttcgttaacaaggttgacaccattgacgaccctgaaatgttggaattggttgagatggaaatgagagaattgttgactacttacggttttgacggtgatgagactcctgttatcatgggttctgctttgtgcgctttggaagagaagcaaccagagattggtgagcaggctatcatgaagttgttggacgctgtcgatgagtacattccaaccccacagcgtgacttggagcagccattcttgatgcctgttgaggatgttttctccatttctggtagaggtactgtcgttactggtagagttgagagaggttctttgaagaagggtgaggaaatcgagattgtcggtgacttcgccaagactttcaaggctaccgttactggtattgagatgttcaagaaggaattggatgctgctatggctggtgacaacgccggtatcttgttgagaggtgtcaagagagatgagatctcccgtggtgatgtcttggccaagccaggtactgttactccacacaagaagatcttggcttctttgtacgttttgaccaaggaagaaggtggtcgtcacaacccattcgctgagaactacaagccacagttgttcctcagaaccaccaacgtcactggtaccatgagattcccagaaggtgaagatgttgaccactctgccatggttaacccaggtgacaacgttgagatggaaatcgagttgggtagaaaggccccacttgagtt

SEQ ID NO: 1567 - DNA, 1062 bp, Candida kefyr
  ref <308>: DATABASE ACCESSION NUMBER: ATCC 28838
catggtaagaccactttgactgctgccatcaccaagactctagctgaacgtggtggtgctgactttttggactactcttctattgacaaggctccagaagaaagagcyagaggtatcactatttctactgctcatgttgaatacgagactgaaaagagacattactcccacgttgactgtccaggtcacgctgattacatcaagaacatgattactggtgctgctcaaatggacggtgctattattgttgttgctgctactgatggtcaaatgcctcaaaccagagagcatttgttgttggccagacaagttggtgtccaacacattgttgttttcgttaacaaggttgacaccatcgatgatccagaaatgttggaattggttgaaatggaaatgagagaattrttgactcaatatggctttgacggtgacaacactccagtgatcatgggttctgctttgtgtgccttggaaggtaagcaaccagaaattggtgagcaagccatcatgaagttgttggacgctgttgacgaatacatcccaaccccagcccgtgacttggaaaavccattcttgatgcctgttgaagatatcttctccatttccggtagaggtactgtcgtcactggtagagttgaacgtggtaacttgaagaagggtgaagaaatcgaaattgttggtcacaacaccactcctttcaagactactgttactggtattgaaatgttcagaaaggaattggaccaagccatggctggtgacaacgctggtgtccttttgagaggtgtcagaagagaccaattgaagagaggtatggttttggctaagccaggtactgttaaggcccacaccaagttcttggcttccttgtacattttgaccaaggaagaaggtggtagacactccggtttcggtgaaaactacagaccacaaatctacgtcagaactgctgacgttaccgtdgtcttgaagttcccagaatctgttgaagaccattccatgcaagtcatgccaggtgacaatgtcgaaatggagtgtgaattggttcacccaactccattg

SEQ ID NO: 1568 - DNA, 1062 bp, Candida lusitaniae
  ref <308>: DATABASE ACCESSION NUMBER: ATCC 66035
cggaaagaccaccttgaccgccgccattaccaaggttttggctgacaagggtggcgccaacttcttggactacggtgccattgacaaggctcctgaagaaagagcacgtggtatcaccatttccactgcccacgttgaatacgagaccgacaacagacactacgcccacgttgactgtccaggtcacgccgattacatcaagaacatgatcacgggtgccgctcaaatggacggtgccattattgttgttgcagccaccgacggccaaatgcctcaaaccagagagcacttgttgttggccagacaagttggtgtgcaacacttggttgttttcgtgaacaaggttgataccatcgacgacccagaaatgttggaattggttgaaatggaaatgagagaattgttgactcaatacggatttgacggcgatgaaacccctgttgttatgggctctgctctttgcgctttggaaggtagagaaccagagattggtgagcaagccatcaccaagttgttggaggctgttgacgagtacatcccaaccccacaacgtgacttggaacaaccattcttgatgcctgttgaagatgttttctccatttctggtagaggtactgttgtcactggtagagtggagagaggttccttgaagaagggtgaggagatcgagattgttggtgactttgacaagcctttcaagactactgttactggtattgagatgttcaagaaggaattggacgctgctatggctggtgacaatgctggtatcttgttgagaggtgtcaagagagaacaagtttcccgtggtatggttttggccaagccaggcactgtgacctcgcacaagaaggttttggcttctttgtacattttgtctaaggaagaaggtggtcgtcactctccatttggcgagaactacaagcctcaattgttccttagaactaccgatgtcactggtactttgagattcccagcaggtgaggacgttgaccactccgctatggtttctccaggtgacaatgtcgagatggaaatcgagttggtcagaaagactcctct

SEQ ID NO: 1569 - DNA, 990 bp, Candida sphaerica
  ref <308>: DATABASE ACCESSION NUMBER: ATCC 2504
tcaccaagactttggctgaacgtggtggtgctgatttcttggactactcttccattgacaaggctccagaagaaagagcragaggtatcactatttctactgcacatgttgaatatgaaactgacaagagacattactctcacgtcgactgtccaggtcatgctgattacatcaagaatatgattactggtgctgcccaaatggatggtgctatcattgttgttgctgctacagatggtcaaatgcctcaaaccagagaacatttgttgttggctagacaagttggtgttcaacayatcgttgttttcgttaacaaggttgacactatcgatgaccctgaaatgttagaattggttgaaatggaaatgagagaattattgacccaatacggtttcgatggtgacaacactccagtcatcatgggttctgctttgtgtgctttagaaggtaagcaaccagaaattggtgaacaagcaatcatgaagttattggacgctgttgacgaatacatcccaactccagctcgtgatttggaaaagcctttcttgatgcctgttgaagatatcttctccatctccggtagaggtaccgtcgtaactggtagagttgaacgtggtaacttgaakaagggtraagaaatcgaaatcgttggtcacaacaccactccattcaagaccactgttactggtattgaaatgttcagaaaggaattggaccaagctatggctggtgataacgctggtgtcwtgttgagaggtgtcagaagagaccaattaaagagaggtatggtcttggccaagccaggtactgtcaaggctcacaccraattcttggcctctttgtatatcttgaccaaggaagaaggtggtagacattccggtttcggtgaaaattacagacctcaaatctacgttagaactgctgatgtcaccgttgttttgaagttcccagaagctgttgaagatcactctatgcaagtcatgccaggtg

SEQ ID NO: 1570 - DNA, 1184 bp, Candida tropicalis
  ref <308>: DATABASE ACCESSION NUMBER: ATCC 750
gatcatggtaaaaccactttgactgctgccattactaaagtcttggctgataaaggtcaagctaacttcttagattacggttctattgatagagctccagaagaaagagccagaggtatcaccatctctactgcccacgttgaatatgaaaccgaaaaaagacattacgcccatgttgagtatgtatacttttttttgttgtgtaattgttttaaagattttctttaaagctgaagaagtcaaatcagttctttgataacttctattaaaaaaagggaaaaattaacaagatatactaacactataacagttgtcctggacatcaagattatatcaagaatatgattaccggtgccgctcaaatggatggtgctattattgttgttgctgccactgatggtcaaatgccacaaaccagagaacatttgttgttggctagacaagtcggtgttcaagatttggttgtctttgttaacaaagtcgacactattgatgacccagaaatgttggaattggttgaaatggaaatgagagaattattgactacttacggttttgatggtgataacactcctgttatcatgggttctgctttgatggccttgcaaggtaaacaaccagaaattggtgaacaagctatcatgaaattgatggacgctattgatgaacacattccaaccccaaccagagacttggaacaatctttcttgatgccagttgaagatgttttctccatttctggtagaggtactgttgttactggtagagtcgaaagaggtgtcttaaagaagggtgaagaaattgaaattgttggtggtttcgaaaaaccattcaagaccactgttactggtattgaaatgttcaagaaagaattagatgctgctatggctggtgacaactgtggtgtcttgttgagaggtgtcaagagagacgaaatcaagagaggtatggttttggctaaaccaggtactgctacttcccacaagaaattcttggcttccatgtatatcttaactgctgaagaaggtggtcgttccactccattcggtgaaggttacaagccacaatgtttcttcagaactaacgatgttaccacttccttctctttcccagaaggtgaaggtgttgaccactcccaaatggttatgccaggtgacaacattgaaatggtcggtgaattgatt

SEQ ID NO: 1571 - DNA, 1071 bp, Candida viswanathii
  ref <308>: DATABASE ACCESSION NUMBER: ATCC 28269
cgatcacggtaagaccaccttgaccgccgccatcaccaaggtcttggccgacaagggtcaggctaacttcttggactacggatccattgacagagcccctgaagaaagagcaagaggtatcactatctccactgcccacgttgaatacgagactgataagagacactatgcccacgttgattgcccgggccatcaagattatatcaagaatatgatcactggtgctgcccaaatggacggtgctatcattgttgttgctgctactgacggtcagatgccacaaaccagagaacacttgttgttggctagacaagttggtgtccaagacttggttgttttcgttaacaaggttgacactatcgatgacccagaaatgttggaattggttgaaatggaaatgagagaattattatcttcttayggctttgacggtgacaacaccccagttgtcatgggttccgctttgatggctttgcaaggtaagcaaccagaaattggtgaacaagctattattaagttgatggacgctattgatgaacacatyccaaccccaaccagagacttggaacaaccattcttgttgccagttgaagatgtcttttctatttccggtagaggtaccgtcgtcactggtagagtcgaaagaggtgtcttgaagaagggtgaagaaattgaaattgtcggtaactttgaaaagccattcaagaccaccgttactggtattgaaatgttcaagaaggaattggatgctgctatggctggtgacaactgtggtgtcttgttgagaggtgtcaagagagacgaaatcagcagaggtatggttttggccaagccaggtaccgtcacttcccacaagaagttcttggcctccatgtacatcttgactggtgaagaaggtggtcgtcgtaccccattcggtgaaggttacaagccacaatgtttcttcagaaccaatgacatcaccaccactttcactttcccagaaggtgaaggtgtcgaccactcccaaatggttatgccaggtgacaacatcgaaatggttggtgaattgtacaaggcttgtccttggaa

SEQ ID NO: 1572 - DNA, 817 bp, Alcaligenes faecalis subsp. faecalis
  ref <308>: DATABASE ACCESSION NUMBER: ATCC 8750
tatcttggttwgctcggccgctgacggcccaatgcctcagactcgcgagcacatcctgctgagccgtcaggttggcgttccttacatcatcgtgttcctgaacaaggccgacatggttgatgacgaagagctgatcgaactggttgaaatggaagttcgcgagctgttgtccaagtacgacttccctggcgacgacaccccgatcatcaagggttcggccaaactggctctggaaggcgacgaaggcccactgggcagccaagccgttctggctctggccgaagcgctggacaactacattcctacgcctgagcgtgccgttgacggtacgttcctgatgcctgttgaagacgtgttctcgatctccggccgtggtacggttgtgaccggtcgtattgagcgcggcatcatcaaggtcggcgaagaaatcgaaatcgtgggtatcaaagacacggtcaagaccatttgtaccggcgttgaaatgttccgcaaactgctggaccagggcgaagctggcgataacgtcggtctgctgctgcgtggtaccaagcgtgaagacgtggaacgtggtcaagttctggccaagccaggctcgatcaagccacacactgacttcgacgccgaggtgtacattctgtccaaagaagaaggtggtcgtcacactcctttcttcaagggctaccgtcctcagttctacttccgtacaactgacgtgaccggcaccatcgagctgccagaagacaaggaaatggttctgccaggcgacaacatttcgatgaaagtgtccctgatcgctcctatcgccatggaagaaggt

SEQ ID NO: 1573 - DNA, 796 bp, Prevotella buccalis
  ref <308>: DATABASE ACCESSION NUMBER: ATCC 35310
tatccttgtagttgctgctactgatggtcctatgccacagacacgtgagcacgtgcttttggctcgtcaggtaaacgttcctcgtttggttgtgttcatgaacaagtgtgacttggtagaagacgaagagatgcttgaactcgttgaaatggagttgcgcgaacttcttgagcaatacgaattcgaagaggatactccaatcgttcgtggttctgcactgggtgcattgaatggtgttgacaagtgggttgacagcgtgatgacgttgatggacactgttgacgagtggattcaagagccagagcgtgaccttgacaaacctttcttgatgccagtagaggacgtgttctctatcacaggtcgtggtaccgttgtaacaggacgtattgagactggtaaggtaaaggttggcgacgagattcagttgctcggtcttggtgaggacaagaagtctgttgtaacaggcgttgaaatgttccgtaagattctttctgaaggtgaagcaggtgataacgtaggacttttgctccgcggtatcgataaggatgaagtaaagcgtggtatggttgttgtacacccaggtgccatcactcctcacgatcacttcaaggcttccatctatgtattgaagaaggaagagggtggacgtcatactccattcggaaacaagtatcgtcctcagttctatctccgtacaatggactgtacaggtgagatcactttgccagaaggcgtagagatggtgatgcctggtgacaacgtagagattgaggttaccttgatttacaaggttgcc

SEQ ID NO: 1574 - DNA, 820 bp, Succinivibrio dextrinosolvens
  ref <308>: DATABASE ACCESSION NUMBER: ATCC 19716
gctattctagtagtagcagcaactgatggtcctatgccacagacccgtgagcacatcctattagcacgtcaggtaggcgtaccatacatcatcgtattcctaaacaagtgcgatatggttgacgacgaggaattattagagttagttgagatggacgtacgtgatctattaaatcagtaccagttcccaggcgacgacactccaatcatccgtggttcagcactaggtgcattaaacggcgaagagaagtggaaagaggcaatctatcagttagcagacactctagattcatacattccagagccaaagcgtgatatcgatgatccattcctattaccaatcgaagatatcttctcaatctcaggtcgtggtactgtagtaaccggccgtgtagagcgtggtattgtacacgtaggtgacgaagttgaaatcgttggtattcgtccaaccaccaagaccactgtaactggcgttgaaatgttccgtaagttactagacgaaggtcgtgcaggtgataacgttggtgttctactacgtggtaccaagcgtgatgaggttgagcgtggtcaggttctagctgctccaggcacaatcactccacacaccaagttcactggtcaggtttacgtactaagcaaggatgaaggtggtcgtcacactccattcttcaagggctaccgtccacagttcttcttccgtacaaccgatattaccggttctatcgatctgaaagagggcgtagagatggtaatgccaggtgataacaccgacatgaccgtaaccctaatccacccagtagctatggctgaaggcgagagat

SEQ ID NO: 1575 - DNA, 803 bp, Tetragenococcus halophilus
  ref <308>: DATABASE ACCESSION NUMBER: ATCC 33315
ggtagtgtctgcagctgacggcccaatgccacaaactcgtgaacatatcctattgtcacgtaacgttggtgtaccatacatcgttgtattcttaaacaaaatggatatggttgacgatgaagaattacttgaattagttgaaatggaagtacgtgatctattaactgaatacgacttcccaggtgatgatactcctgttatttctggttcagctttgaaagctttagaaggcgacgaagaatatgaacaaaaagtcttagacttaatggcagctgtagatgatttcatcccaactcctgaacgtgaccatgacaaaccgttcatgatgccgattgaagatgttttctcaatcactggtcgtggaactgttgctacaggtcgtgttgaacgtggaactattaaagtcggtgatgaagttgatatcatcggtattcatgaaaatgttaaaaagacaactgttacgggtgtagaaatgttccgtaaattgttggattacgctgaagctggcgataacatcggtacattattgcgtggtgtttctcgtgatgatatcgaacgtggtcaagtgttggctaaaccaggcacaatcacaccacatacaaaattctcagctgaagtttatgtattaacaaaagaagaaggcggacgtcatactccattcttctcaaactatcgcccacaattttacttccgtacaactgacatcactggtgtcattgaattgccagaaggtactgaaatggttatgccaggtgataacgtagcaatggaagttgaattaattcaccctgttgctattgaaa

SEQ ID NO: 1576 - DNA, 805 bp, Campylobacter jejuni subsp. jejuni
  ref <308>: DATABASE ACCESSION NUMBER: ATCC 33292
ttaatgaagcaattgttgtaaattttgaaagcgaaggaaaaaaacataaacttgttttagaagtagcagctcatttaggagataatagagttagaactattgctatggatatgacagatggtttggtaaggggcttaaaagctgaggctttaggtgctcctattagtgttcctgttggtgagaaagttttaggaagaattttcaatgttactggagatttgatcgatgaaggtgaagaaatttcttttgataaaaaatgggcaattcatagagatccgccagcttttgaagatcaaagcacaaaaagtgagatttttgaaacagggattaaagttgtagatttgcttgctccttatgcaaaaggtggtaaagtaggtctttttggtggtgcaggtgttggtaaaactgttattattatggagcttattcacaatgttgcatttaagcatagcggctattctgtatttgcaggtgtgggtgagagaactcgtgaaggaaatgacctttataatgaaatgaaagaaagtaatgttttagacaaagttgctctatgttatggacaaatgaatgaaccaccaggagcaagaaatcgtattgctttaacaggtttaacaatggctgagtattttagagatgaaatgggtcttgatgtgcttatgtttattgataatatctttagattttcacaatcaggttctgaaatgtcagcacttttaggaagaattccatcagctgtgggttatcaaccaaccctagcaagtgaaatgggtaaattccaagaaagaattacttcaactaaaaaagg

SEQ ID NO: 1577 - DNA, 809 bp, Campylobacter rectus
  ref <308>: DATABASE ACCESSION NUMBER: ATCC 33238
atttacccaagatcaacgaagccgtcgaagtaaatttcgaggttgagggcaagcaaaacagacttgtgttagaggttgccgcacaccttggcgataaccgcgtaagaacgatcgctatggatatgagcgaaggcttaaccagaggccttgaggctacggctcttggcgcgcctattagcgttccggtcggcgaaaaagttttgggaaggatttttaacgtcgtcggcgatctgatcgacgagggtgaaggcatagaatttgataaaaaatggtctatccaccgcgatcctccgccgtttgaagagcaaagcacgaagagtgaaatttttgaaacgggtataaaagtggtcgatcttctagccccttatgcaaaaggcggtaaggtcggattattcggcggtgccggcgtcggtaagacggttattatcatggagcttatccacaacgttgcatttaagcatagcggttattccgtgtttgccggcgtgggcgagcgaacccgcgaaggaaacgacctttatcacgagatgaaagagagtaacgttttggacaaagtcgccttgtgctacggccagatgaacgagccgccgggagcaagaaaccgcatcgctctaacaggcctaacgatggctgaatacttccgcgacgagatgggacttgacgttttgatgtttatagacaacatcttccgtttctctcagtctggcgctgagatgtcggcgcttcttggacgtatcccgtcagccgttggttatcagccgactttggcgagcgaaatgggcaaattccaagagagaattacatcaacc

SEQ ID NO: 1578 - DNA, 1671 bp, Enterococcus casseliflavus
  ref <308>: DATABASE ACCESSION NUMBER: ATCC 25788
aatcgaagtgcaacgttcattgcgtgtacttgatggtgctgtaactgtgttggactcacaatcaggtgtagaacctcaaacagaaacagtttggcgtcaagcgacagattaccgcgtaccgcgtgttgtattctgtaacaaaatggacaaaattggtgcagacttcttatactctgtatcaactttacatgatcgtttacaagcaaatgctcacccaatccaattaccaattggtgcggaagatgactttactggtattatcgacttagtaaaaatgaaagctgaaatctacacaaatgacttaggaactgaaatccaagagactgaaattcctgaagaatacgtagaattagctgaagaatggcgcgaaaaattaattgaagctgttgctgatactgatgaagaactaatgatgaaattcttggaaggtgaagaaatcactgaagaagaattgaaagctggtattcgtcaagcaacattgactgttgactttttccctgttctttgcggatctgcctttaaaaacaaaggggttcaattgatgttggatgcagtcatcgactacttgccttcaccacttgatgttcctgcgattaaagggatcaatcctaaaacagacgaagaaactgatcgtccggctgacgatgaagcaccatttgcttcattagcatttaaagtaatgactgacccattcgtargtcgtttgacattcttycgtgtgtattcargtatcttgaactctggatcatacgtattgaatgcttcaaaaggcaaacgcgaacgtatcggtcggatcctacaaatgcacgccaacactcgtgctgaaatccaaacagtatactcaggcgatatcgccgctgctgttggtttgaaagacacaacaactggggatccactatgtgatgaaaaatccccagtaatccttgaatcaatcgaattcccagaaccagttatcgaagtcgctgttgagcttaaatcaaaagctgaccaagataaaatgggggttgctttacaaaaacttgctgaagaagatccatcattccgtgtggaamcaaacgctgaaacaggcgaaactgttatcgctggtatgggagaacttcacttggacgtcttagttgaccgtatgcgtcgcgaatttaaagttgaagcaaacgtaggtgcgcctcaagtttcttatcgtgaaacattccgtgcagcaacacaagcggaaggtaaatttgtacgtcagtctggtggtaaaggtcaatacggtcacgtatgggtcgaatttacaccaaacgaagaaggtaaaggcttcgaattcgaaaacgcgattgtcggtggtgtggttcctcgtgaatacatcccagcagttgaaaaaggacttgaagaatcaatggcgaacggtgtcttagccggttacccattagtagacatcaaagcaaaactttatgatggttcataccatgatgtcgattcaagtgaaactgccttccgtgttgcagcttctatggctttacgtgctgcagcgaagaaagcaaacccagtaattcttgaaccaatgatgaaagtagttatcactgtaccagaagattacttaggtgatgttatgggtcacgtaactgctcgtcgtggacgcgtagaaggaatggaagcacwcggtaactcacaaatcgtgaacgcaatcgtgcc

SEQ ID NO: 1579 - DNA, 1662 bp, Enterococcus gallinarum
  ref <308>: DATABASE ACCESSION NUMBER: ATCC 49573
gaagtacaacgttcactacgggttcttgacggwgctgtaacagtattggactcacaatctggtgtagaaccacaaactgaaacagtttggcgtcaagcgacagattaccgcgtaccacgtatcgtattctgtaacaaaatggataaaatcggtgcagacttcttatactctgtatctactttacatgatcgcttgcaagcaaatgctcatccaatccaattaccaattggtgcggaagatgactttactggtatcatcgatctagtaaaaatgaaagctgagatctatacaaacgatttaggaacagagattcaagaaactgaaattcctgaagagtacaaagaattagctgaagaatggcgcgaaaaattagttgaagctgttgcagatactgacgaagagctaatgatgaaattcttggaaggtgaagaaatcactgaagaagaattgaaagctggtatccgtcaagcgacattgactgttgaatttttcccagttctttgtggttcagccttcaaaaacaaaggggttcaattgatgttggatgcagtcatcgactaccttccttcaccacttgatgttcctgcaatcaaagggatcaatcctaaaactgacgaagaaactgatcgtcctgctgacgatgaagcgccttttgcttcactagcatttaaagtaatgactgacccattcgtaggtcgtttgacattcttccgtgtgtattcaggtgtcttgaactctggatcatatgtcttgaatgcttcaaaagacaaacgcgaacgtatcggtcgtattctgcaaatgcacgcgaacacttgtgcagaaatccaaacagtttattcaggcgatatcgctgcagctgttggtttgaaagattccacaacaggggatacattgtgtgcgaaaaatcacccagtaatccttgaatcaatcgaattcccagamccagttatcgaagtagctgttgaacytaaatcaaaagctgaccaagataaaatgggtgtggctttacaaaaacttgctgaagaagatccttcattccgtgtagaamcaaacgctgaaactggcgaaactgttatcgcagggatgggtgaacttcacttggacgtccttgttgaccgtatgcgtcgcgaatttaaagttgaagcaaacgttggtgcgcctcaagtttcttaccgcgaaacattccgtgcttctacgcaagccgaaggtaaatttgtacgtcagtctggtggtaaaggtcaatacggtcacgtatggatcgaatttacaccaaacgaagaaggtaaaggcttcgaattcgaaaacgcaattgtcggtggtgtggttccacgtgaatacatcccagcagttgaaaaaggacttgaagactcaatggctaacggtgttctagctggttatccattggttgacatcaaagccaagctttacgatggttcataccatgatgtcgattcaagtgaaacagccttccgtgtggcagcttcaatggctttacgtgctgcagcgaagaaagctaatccagtgattcttgaaccaatgatgaaagttgttatcactgttcctgaagattacttaggtgatattatgggacacgtaactgctcgtcgtggacgtgttgaaggtatggaagcgcatggtaactcacaaatcgttaacgcgatt

SEQ ID NO: 1580 - DNA, 1669 bp, Streptococcus mitis
  ref <308>: DATABASE ACCESSION NUMBER: ATCC 49456
caatcgaagtacaacgttctcttcgtgtattggatggtgctgttaccgttcttgactcacaatcaggtgttgagcctcaaactgaaacagtttggcgtcaagcaactgagtatggagttccacgtatcgtatttgccaacaaaatggacaaaatcggtgctgacttcctttactctgtaagcacacttcacgatcgtcttcaagcaaatgcacacccaatccaattgccaatcggttctgaagatgacttccgtggtatcatcgacttgatcaagatgaaagctgaaatctatactaacgaccttggtacagatatccttgaagaagacatcccagctgaataccttgaccaagctcaagaataccgtgaaaaattgatcgaagcagttgctgaaactgacgaagaattgatgatgaaatacctcgaaggtgaagaaatcactaacgaagaattgaaagctggtatccgtaaagcgactatcaacgttgaattcttcccagtattgtgtggctctgccttcaagaacaaaggtgttcaattgatgcttgatgcggttattgactaccttccaagcccacttgacatcccagcgatcaaaggtatcaacccagatwcagatgaagaagaaactcgtccagcatctgatgaagagccatttgcagctcttgccttcaagatcatgacagacccattcgtaagtcgtttgacattcttccgtgtttactcargtgktcttcaatcaggttcatacgtattgaacacttctaaaggkaaacgtgagcgtatcggacgtatccttcaaatgcacgccaacagccgtcaagaaattgacactggttactcaagagatatcgctgctgccgttggtttgaaagatactccaactggtgactcattgccagatgaaaaagctaaaatcattcttgagtcaatcaacgttccagamccagttatccaattgatggttgagccaaaatctaaagctgaccaagccaagatgggtatcgcccttcaaaaattggctgaagaagatccaacattccgcgttgaamcaaacgttgaaactggtgaamcagttatctctggtatgggtgagcttcaccttgacgtccttgttgaccgtatgcgtcgtgagttcaaagttgaagcaaacgtaggtgctcctcaagtatcttaccgtgaaacattccgcgcttctactcaagcacgtggattcttcaaacgtcagtctggtggtaaaggtcaattcggtgatgtatggattgaatttactccaaacgaagaaggtaaaggattcgaattcgaaaacgcaatcgtcggtggtgtggttcctcgtgaatttatcccagcggttgaaaaaggtttggtagaatctatggctaacggtgtacttgcaggttacccaatggttgacgttaaagctaagctttacgatggttcataccacgatgtcgactcatctgaaactgccttcaagattgcggcttcacttgctcttaaagaagctgctaaatcagcacaaccagctatccttgagccaatgatgcttgtaacaatcactgttccagaagaaaaccttggtgatgttatgggtcacgtaactgctcgtcgtggacgtgtagatggtatggaagcacwcggtaacagccaaatcgttcgtgcttacgt

SEQ ID NO: 1581 - DNA, 26 bp, Artificial Sequence
  Synthetic DNA Sequence
aattggggactacacctattatgatg

SEQ ID NO: 1582 - DNA, 23 bp, Artificial Sequence
  Synthetic DNA Sequence
ggcaaatcagtcagttcaggagt

SEQ ID NO: 1583 - DNA, 23 bp, Artificial Sequence
  Synthetic DNA Sequence
cgattggcaacaatacactcctg

SEQ ID NO: 1584 - DNA, 26 bp, Artificial Sequence
  Synthetic DNA Sequence
tcacctatttttacgcctggtaggac

SEQ ID NO: 1585 - DNA, 645 bp, Enterococcus faecium
atgactatacctgacgcaaatgcaatctatcctaactcagccatcaaagaggttgtctttatcaagaacgtgatcaaaagtcccaatattgaaattggggactacacctattatgatgacccagtaaatcccaccgattttgagaaacacgttacccatcactatgaatttctaggcgacaaattaatcatcggtaaattttgttctatcgccagtggcattgaatttatcatgaacggtgccaaccacgtaatgaaaggtatttcgacttatccatttaatattttaggtggcgattggcaacaatacactcctgaactgactgatttgccgttgaaaggtgatactgtagtcggaaatgacgtgtggtttgggcaaaatgtgaccgtcctaccaggcgtaaaaataggtgacggtgccattatcggagcaaatagtgttgtaacaaaagacgtcgctccatatacaattgtcggtggcaatccaattcaactcatcggaccaagatttgaaccggaagttattcaagcattagaaaatctggcatggtggaataaagatattgaatggataactgctaatgttcctaaactaatgcaaacaacacccacacttgaattgataaacagtttaatggaaaaataa

SEQ ID NO: 1586 - DNA, 26 bp, Artificial Sequence
  Synthetic DNA Sequence
attcccacaatcttttttatcaataa

SEQ ID NO: 1587 - DNA, 24 bp, Artificial Sequence
  Synthetic DNA Sequence
cattgttcagattcggtaaagttc

SEQ ID NO: 1588 - DNA, 25 bp, Artificial Sequence
  Synthetic DNA Sequence
gtttttgaagttaaatagtgttctt

SEQ ID NO: 1589 - DNA, 21 bp, Artificial Sequence
  Synthetic DNA Sequence
cttccatttgtactttcccta

SEQ ID NO: 1590 - DNA, 1920 bp, Unknown Organism
  Description of Unknown Organism: Cloning vector pFW16
atgaaaattattaatattggagttttagctcatgttgatgcaggaaaaactaccttaacagaaagcttattatataacagtggagcgattacagaattaggaagcgtggacaaaggtacaacgaggacggataatacgcttttagaacgtcagagaggaattacaattcagacaggaataacctcttttcagtgggaaaatacgaaggtgaacatcatagacacgccaggacatatggatttcttagcagaagtatatcgttcattatcagttttagatggggcaattctactgatttctgcaaaagatggcgtacaagcacaaactcgtatattatttcatgcacttaggaaaatggggattcccacaatcttttttatcaataagattgaccaaaatggaattgatttatcaacggtttatcaggatattaaagagaaactttctgccgaaattgtaatcaaacagaaggtagaactgtatcctaatgtgtgtgtgacgaactttaccgaatctgaacaatgggatacggtaatagagggaaacgatgaccttttagagaaatatatgtccggtaaatcattagaagcattggaactcgaacaagaggaaagcataagatttcagaattgttctctgttccctctttatcatggaagtgcaaaaagtaatatagggattgataaccttatagaagttattactaataaattttattcatcaacacatcgaggtccgtctgaactttgcggaaatgttttcaaaattgaatatacaaaaaaaagacaacgtcttgcatatatacgcctttatagtggagtactacatttacgagattcggttagagtatcagaaaaggaaaaaataaaagttacagaaatgtatacttcaataaatggtgaattatgtaagattgatagagcttattctggagaaattgttattttgcaaaatgagtttttgaagttaaatagtgttcttggagatacaaaactattgccacagagaaaaaagattgaaaatccgcaccctctactacaaacaactgttgaaccgagtaaacctgaacagagagaaatgttgcttgatgcccttttggaaatctcagatagtgatccgcttctacgatattacgtggattctacgacacatgaaattatactttctttcttagggaaagtacaaatggaagtgattagtgcactgttgcaagaaaagtatcatgtggagatagaaataacagagcctacagtcatttatatggagagaccgttaaaaaatgcagaatataccattcacatcgaagtgccgccaaatcctttctgggcttccattggtctatctgtatcaccgcttccgttgggaagtggaatgcagtatgagagctcggtttctcttggatacttaaatcaatcatttcaaaatgcagttatggaagggatacgctatggttgtgaacaaggattgtatggttggaatgtgacggactgtaaaatctgttttaagtatggcttatactatagccctgttagtaccccagcagattttcggatgcttgctcctattgtattggaacaagtcttaaaaaaagctggaacagaattgttagagccatatcttagttttaaaatttatgcgccacaggaatatctttcacgagcatacaacgatgctcctaaatattgtgcgaacatcgtagacactcaattgaaaaataatgaggtcattcttagtggagaaatccctgctcggtgtattcaagaatatcgtagtgatttaactttctttacaaatggacgtagtgtttgtttaacagagttaaaagggtaccatgttactaccggtgaacctgtttgccagccccgtcgtccaaatagtcggatagataaagtacgatatatgttcaataaaataacttag

SEQ ID NO: 1591 - DNA, 20 bp, Artificial Sequence
  Synthetic DNA Sequence
atgaggtaatagaacggatt

SEQ ID NO: 1592 - DNA, 21 bp, Artificial Sequence
  Synthetic DNA Sequence
cagtatttcagtaagcgtaaa

SEQ ID NO: 1593 - DNA, 36 bp, Artificial Sequence
  Synthetic DNA Sequence
  modified_base (29): i
ccgagcgatttaccggatacttggctgcncgctcgg

SEQ ID NO: 1594 - DNA, 1032 bp, Enterococcus faecium
  strain N97-330
atgtttagaattaaagttgcagttctgtttgggggctgttcagaggaacataatgtttcgataaaatctgcgatggagattgccgcaaacatagatacaaaaaagtatcagccttattatattggaatcacaaaatccggcgtttggaaaatgtgtgaaaaaccttgtttggagtgggaacaatatgcgggggatccggttgttttttcaccggacagaagtacgcatggtctgctgatacaaaaagacactgggtatgaaatccagcctgtggatgtgggattaccgatgattcatggcaagtttggcgaggatggctccatacaaggcttgcttgaattgtcaggcattccgtatgtgggatgcgatattcaaagctccgtgacctgcatggataaggcgcttgcatataccgttgtgaaaaatgcgggtatcgctgtgcctgggttccggatccttcaggagggggatcgcctggaaacagaggatttcgtatatcccgtttttgtaaagcctgcccgttccggctcatcctttggcgtaaacaaggtatgcaaggcagaagaactgcaggcagcaatcgaagatgcaagaaaatatgacagcaagattttgattgaagaggccgttaccgggagtgaggtaggctgcgccatactgggaaacggaaatgatctcatggctggcgaggtggatcagattgagctgagacacggcttttttaagattcatcaggaagcacagccggagaaaggatctgaaaatgcagtcatccgagttccagccgccttaccggatgaggtaatagaacggattcagaaaacagcaatgaagatttaccggatacttggctgcagaggattggcccgcattgacctgtttttgcgggaggacggctgcattgtgttgaatgaagtgaataccatgccgggttttacttcctacagccgttatccccgcatgatgacagcagccggttttacgcttactgaaatactggatcgcttgattgaactttcacttaggaggtaa

SEQ ID NO: 1595 - DNA, 25 bp, Artificial Sequence
  Synthetic DNA Sequence
aaataatgctccatcaatttgctga

SEQ ID NO: 1596 - DNA, 24 bp, Artificial Sequence
  Synthetic DNA Sequence
atagtcgaaaaagccatccacaag

SEQ ID NO: 1597 - DNA, 24 bp, Artificial Sequence
  Synthetic DNA Sequence
gatgaatttgcgaaaatacatgga

SEQ ID NO: 1598 - DNA, 23 bp, Artificial Sequence
  Synthetic DNA Sequence
cagccaatttctacccctttcac

SEQ ID NO: 1599 - DNA, 604 bp, Enterococcus faecalis
  strain BM4405
cagggagtatttgagttattagatattccatatgtaggttgtggtatcggagctgcagcaatttccatgaataaaataatgctccatcaatttgctgaaatagttggtgtaaaaagcactcctagtatgattatagaaaagggacaagacctacaaaaagtcgatgaatttgcgaaaatacatggatttcctttatatatcaaaccgaatgaggcaggctcatcaaaaggaattagcaaggtagaacaaaaaagtgatttatataaagcaatagacgaagcttcaaaatatgatagccgtattttaattcaaaaggaagtgaaaggggtagaaattggctgtgggattttagggaatgaacaattggtcgttggagaatgtgatcaaattagtcttgtggatggctttttcgactatgaagagaaatacaatttagtaacagcagaaattttgttaccagctaaactatcaatagacaaaaaagaagacatccagataaaagcaaaaaaactatacagactattagggtgcaaaggattagcgagaatcgactttttcttaacggatgacggagaaattttattaaatgagatcaacaccctcc

SEQ ID NO: 1600 - DNA, 805 bp, Campylobacter jejuni subsp. doylei
  ref <308>: DATABASE ACCESSION NUMBER: ATCC 49349
acctcaaattaatgaagcaattgttgtaaattttgaaagcgaaggaaaaaaacataaacttgttttagaagtagcagctcatttaggagataatagagttagaactattgctatggatatgacagatggtttggtaaggggcttaaaagctgaggctttaggtgctcctattagtgttcctgttggtgagaaagttttaggaagaattttcaatgttactggagatttgatcgatgaaggtgaagaaattccttttgataaaaaatgggcaattcatagagatccgccagcttttgaagatcaaagcacaaaaagtgagatttttgaaacagggattaaagttgtagatttacttgctccttatgcaaaaggtggtaaagtaggtctttttggtggtgcaggtgttggtaaaactgttattattatggagcttattcacaatgttgcatttaagcatagcggctattctgtatttgcaggtgtgggtgagagaactcgtgaaggaaatgacctttataatgaaatgaaagaaagtaatgttttagacaaagttgctctatgttatggacaaatgaatgaaccaccaggagcaagaaatcgtattgctttaacaggtttaacaatggctgagtattttagagatgaaatgggtcttgatgtgcttatgtttattgataatatctttagattttcacaatcaggttctgaaatgtcagcacttttaggaagaattccatcagctgtgggttatcaaccaaccctagcaagtgaaatgggtaaattccaagaaagaattacttcaact

SEQ ID NO: 1601 - DNA, 826 bp, Enterococcus sulfureus
  ref <308>: DATABASE ACCESSION NUMBER: ATCC 49903
ctccttaccagatatcaacaatgcgctggttgtatataaaaatgatgccaataaaacaaaagttgttttagaagcagcgttagaattaggtgacggaatcattcgtgcgattgcaatggaatcgactgatggattgcaacgtgggatggaagttgtcgatatgggagaatctatttctgtaccagttggaacagaaactttaggacgtgtgtttaatgtattaggagatacgattgacttagaagctccttttcctaaagatgcaccgcgtagtggaatccataaaaaagcccctaattttgatgaattaagtacaagcacagaaattctagaaacagggatcaaagtcatcgatctattagccccttatttaaaaggtggtaaagttggattgtttgggggagccggtgtaggaaaaacggtattgattcaagagttgattcacaatatcgcacaagaacacggtgggatttcggtctttactggtgttggtgagcgtacacgtgaaggaaacgatttgtattatgaaatgaaagattcaggagtcattgaaaaaacagcgatggtgtttggacaaatgaatgagccacctggtgcacggatgcgtgtagccttgactggattaacgattgctgaatatttccgtgatgttgaaggacaggatgtactgttgtttatcgacaatatcttccgttttacacaagctggttctgaagtgtctgccttgttaggtcgtatgccatcagctgtgggatatcaaccaacattagctaccgaaatggggcaattgcaagagcggatcacgtcaacgaaaaaaggatcgatc

SEQ ID NO: 1602 - DNA, 833 bp, Enterococcus solitarius
  ref <308>: DATABASE ACCESSION NUMBER: ATCC 49428
tgatactttaccagatattaataatgcattagtagtatataaaaaggacgaggacaagacacgcgttgtcttagaagccaccttggaacttggagatggcatgattcgtgcaatctctatgggatcgactgatggcttgcaacggggaatggaagttgtggacacacaagcacctatttctgttccagtaggaaatgaaaccttaggacgtgtttttaatgtcttaggagaaacgattgataaacaggcaccgtttcctgaagatgccaaaaaaagtggtattcataaaaaagcacccgcttttgatgaattaagtaccagttctgaaatattggaaaccgggattaaagtaatcgatttgctagctccttatttacgaggtggtaaagttggattatttggcggtgctggcgtgggtaaaacggtattaattcaagaattaattcataacgttgcccaagaacatgggggaatttctgtttttacgggtgtcggagagcgtactcgtgaaggaaatgacctatattatgaaatgcaggattcaggcgttattgaaaaaacggctatggtatttggacaaatgaacgaaccccctggtgcacgtatgcgtgtagcgttaactggtttgacacttgctgagtacttccgtgatgtacaaggtcaagacgtattattatttatagataatattttccgctttactcaagcaggaacagaagtatctgctttattaggacggatgccgtctgccgttggttaccaaccaactctagcaacggaaatgggacagttgcaagaacgaatcacatcgacagataaaggatcaattacct

SEQ ID NO: 1603 - DNA, 806 bp, Campylobacter sputorum subsp. sputorum
  ref <308>: DATABASE ACCESSION NUMBER: ATCC 35980
atcagcctaaaattaacgaagcaatagaagttaattatgaattagatggtaaaaaaataagacttattcttgaagtagctggacatcttggcgataatagagcaagaaccattgctatggatatgagtgatggtttacaaagaggattagaagttacggctcttggtgctcctataacagttcctgttggagataaagttttaggtagaatgtttaatgttgtaggtgacttaatagatgaaggtgaagtaacagattttgataaaagatgggctatccatagagatcctccttcgtttgaagatcaaagtacaaaaagtgaaatttttgaaacaggtataaaagtagttgatcttcttgcaccttatgcaaaaggtggtaaagttggcttatttggtggtgctggcgttggaaaaacagttatcataatggagcttatacataatgttgcatttaaacacagcggttattcaatttttgccggtgttggagagagaacaagagagggaaatgatctttataatgagatgaaagagtctggtgttttggataaagttgccttatgttatggacaaatgaatgaaccaccaggagcaagaaaccgtatagcattaacaggtcttacaatggctgaatatttccgtgatgaaatggggcttgatgtgttgatgtttatagataatatttttagattttctcaatcaggttctgaaatgtcagcgctgcttggtagaattccatctgctgttggttatcaaccaacattagcaagtgagatgggaaaacttcaagaaagaattacttcc

SEQ ID NO: 1604 - DNA, 738 bp, Enterococcus pseudoavium
  ref <308>: DATABASE ACCESSION NUMBER: ATCC 49372
ggtgttatccgcacaatcgctatggaatctacagatggattgcaacgggggatggaagttgtcgataccggcaaaccaatctctgttcctgtaggtaaagaaacattaggtcgtgtgtttaacgtattaggtgaaacgatcgacaaagaagcaccttttccagaagatgtagaaaagagcggtattcacaaaaaggcccccgcttttgaagaccttagcaccagtaatgagattttagaaactgggatcaaggttatcgacttattagccccttacttaaaaggtggtaaagttggactattcggtggtgccggtgttggtaaaaccgtcttaattcaagaactgattcataatatcgcccaagaacacggtgggatttctgtctttaccggggttggggaacggactcgtgaagggaacgacctttattatgaaatgaaagaatccggcgttattgaaaaaacagcgatggtcttcggacaaatgaatgagccaccaggtgcgcggatgcgcgttgccttgactggtttgacattagctgaatatttccgtgatgaagaaggtcaagatgtgttgctatttatcgataacattttccgcttcacacaagccggatcagaagtttcggcgctattaggtcggatgccatctgccgttggttatcaaccaaccttggcaacagaaatgggtcaattacaagaacgaatcacttcaacgaaaaaaggctcaattacatcg

SEQ ID NO: 1605 - DNA, 20 bp, Artificial Sequence
  Synthetic DNA Sequence
  modified_base (12): i
  modified_base (18): i
atyatygaartntaygcncc

SEQ ID NO: 1606 - DNA, 23 bp, Artificial Sequence
  Synthetic DNA Sequence
  modified_base (9): i
  modified_base (12): i
  modified_base (15): i
ccraacatnaynccnactttttc

SEQ ID NO: 1607 - DNA, 336 bp, Klebsiella ornithinolytica ATCC 31898
ctggattatgcgatgtcggtcattgttggccgtgcgctgccggatgtccgagatggcctgaaaccggtacaccgtcgcgtactttacgccatgaacgtattgggcaatgactggaacaaagcctataaaaaatccgcccgtgtcgttggtgacgtaatcggtaaataccaccctcatggtgataccgccgtttatgacaccattgtacgtatggcacagccattctccttgcgttatatgctggtcgatggccagggtaacttcggttctgtcgatggcgactccgccgcagcgatgcgttatacggaaatccgtatgtcgaaaatcgcccacgag

SEQ ID NO: 1608 - DNA, 341 bp, Klebsiella oxytoca
  ref <308>: DATABASE ACCESSION NUMBER: ATCC 13182
ctatctggattatgcgatgtcggtcattgttggccgtgcgctgccggatgtccgagatggcctgaagccggtacaccgtcgcgtactatacgccatgaacgtattgggcaatgactggaacaaagcctataaaaaatctgcccgtgtcgtgggtgacgtcatcggtaaataccaccctcatggtgatactgccgtatacgacaccattgtacgtatggcgcagccattctccctgcgttacatgctggtagatggccagggtaactttggttcggtcgacggcgactccgccgcagcgatgcgttatacggaaatccgtatgtcgaagatcgcccatgaac

SEQ ID NO: 1609 - DNA, 22 bp, Artificial Sequence
  Synthetic DNA Sequence
gccctgatccaaatagcatata

SEQ ID NO: 1610 - DNA, 23 bp, Artificial Sequence
  Synthetic DNA Sequence
cctggcataacagtaacattctg

SEQ ID NO: 1611 - DNA, 22 bp, Artificial Sequence
  Synthetic DNA Sequence
tgggaaaaagcaactccatctc

SEQ ID NO: 1612 - DNA, 23 bp, Artificial Sequence
  Synthetic DNA Sequence
acaactgaattcgcagcaacaat

SEQ ID NO: 1613 - DNA, 639 bp, Staphylococcus aureus
atgaaatatggccctgatccaaatagcatatatccacatgaagaaataaaaagtgtttgttttattaaaaatacaattaccaatccaaatattatagttggagattatacttactattccgatgttaacggagctgaaaaatttgaagaacatgtgacacatcattatgaatttaggggtgataaacttgtaattggcaagttttgtgcaatagctgaaggtatagaatttattatgaatggagcaaaccatagaatgaattcaataacaacttatccttttaatataatgggaaatggttgggaaaaagcaactccatctcttgaagatttaccatttaagggagatactgttgttggaaatgatgtgtggattggtcagaatgttactgttatgccaggaattcaaataggagatggagcaattgttgctgcgaattcagttgttacaaaagatgtaccaccatatcgtattattggtggaaatccgagtagaattataaagaaaaggtttgaagatgaattgatagattatttattgcaaataaaatggtgggattggtcagcacaaaaaatattttctaatcttgaaacactttgtagctctgatttagagaaaataaaatctattcgagattag

SEQ ID NO: 1614 - DNA, 22 bp, Artificial Sequence
  Synthetic DNA Sequence
ccaatccagaagaaatataccc

SEQ ID NO: 1615 - DNA, 24 bp, Artificial Sequence
  Synthetic DNA Sequence
attagtttatccccaatcaattca

SEQ ID NO: 1616 - DNA, 26 bp, Artificial Sequence
  Synthetic DNA Sequence
ataatgaatggggctaatcatcgtat

SEQ ID NO: 1617 - DNA, 24 bp, Artificial Sequence
  Synthetic DNA Sequence
gccaacaactgaataaggatcaac

SEQ ID NO: 1618 - DNA, 639 bp, Staphylococcus cohnii
atgaaatggcaaaatcagcaaggccccaatccagaagaaatataccctatagaaggtaataaacatgttcaatttattaaaccatctataacaaagcccaatattttagttggggaatattcatattacgatagtaaagatggtgaatcttttgaaagccaagttctttatcactatgaattgattggggataaactaatattagggaagttttgttctattggacccggaacgacatttataatgaatggggctaatcatcgtatggatggttcaacatttccattcaatcttttcggaaatggttgggagaagcatacccctacattggaagaccttccttataagggtaacacggaaattgggaacgatgtttggattggacgagatgtgacaattatgcccggtgtaaaaataggaaacggggctattattgcagcaaaatcggttgtgacaaagaacgttgatccttattcagttgttggcggtaatccttcacgattaattaagataaggttttccaaggaaaaaatcgcagcattactaaaagtaaggtggtgggacctagagatagagacgataaatgaaaatattgattgcatcctgaatggtgatataaaaaaggttaaaagaagttag

SEQ ID NO: 1619 - DNA, 24 bp, Artificial Sequence
  Synthetic DNA Sequence
aaggcaaaataaaaggagcaaagc

SEQ ID NO: 1620 - DNA, 23 bp, Artificial Sequence
  Synthetic DNA Sequence
tgtacccgagacatcttcaccac

SEQ ID NO: 1621 - DNA, 26 bp, Artificial Sequence
  Synthetic DNA Sequence
aattgaaggacgggtattgtggaaag

SEQ ID NO: 1622 - DNA, 26 bp, Artificial Sequence
  Synthetic DNA Sequence
cgattttgacagatggcgataatgaa

SEQ ID NO: 1623 - DNA, 1569 bp, Staphylococcus aureus
atgaaaataatgttagagggacttaatataaaacattatgttcaagatcgtttattgttgaacataaatcgcctaaagatttatcagaatgatcgtattggtttaattggtaaaaatggaagtggaaaaacaacgttacttcacatattatataaaaaaattgtgcctgaagaaggtattgtaaaacaattttcacattgtgaacttattcctcaattgaagctcatagaatcaactaaaagtggtggtgaagtaacacgaaactatattcggcaagcgcttgataaaaatccagaactgctattagcagatgaaccaacaactaacttagataataactatatagaaaaattagaacaggatttaaaaaattggcatggagcatttattatagtttcacatgatcgcgcttttttagataacttgtgtactactatatgggaaattgacgagggaagaataactgaatataaggggaattatagtaactatgttgaacaaaaagaattagaaagacatcgagaagaattagaatatgaaaaatatgaaaaagaaaagaaacgattggaaaaagctataaatataaaagaacagaaagctcaacgagcaactaaaaaaccgaaaaacttaagtttatctgaaggcaaaataaaaggagcaaagccatactttgcaggtaagcaaaagaagttacgaaaaactgtaaaatctctagaaaccagactagaaaaacttgaaagcgtcgaaaagagaaacgaacttcctccacttaaaatggatttagtgaacttagaaagtgtaaaaaatagaactataatacgtggtgaagatgtctcgggtacaattgaaggacgggtattgtggaaagcaaaaagttttagtattcgcggaggagacaagatggcaattatcggatctaatggtacaggaaagacaacgtttattaaaaaaattgtgcatgggaatcctggtatttcattatcgccatctgtcaaaatcggttattttagccaaaaaatagatacattagaattagataagagcattttagaaaatgttcaatcttcttcacaacaaaatgaaactcttattcgaactattctagctagaatgcatttttttagagatgatgtttataaaccaataagtgtcttaagtggtggagagcgagttaaagtagcactaactaaagtattcttaagtgaagttaatacgttggtactagatgaaccaacaaactttcttgatatggaagctatagaggcgtttgaatctttgttaaaggaatataatggcagtataatctttgtatctcacgatcgtaaatttatcgaaaaagtagccactcgaataatgacaattgataataaagaaataaaaatatttgatggcacatatgaacaatttaaacaagctgaaaagccaacaaggaatattaaagaagataaaaaacttttacttgagacaaaaattacagaagtactcagtcgattgagtattgaaccttcggaagaattagaacaagagtttcaaaacttaataaatgaaaaaagaaatttggataaataa

SEQ ID NO: 1624 - DNA, 26 bp, Artificial Sequence
  Synthetic DNA Sequence
ttctttaatgctcgtagatgaaccta

SEQ ID NO: 1625 - DNA, 25 bp, Artificial Sequence
  Synthetic DNA Sequence
ttttcgtattcttcttgttgctttc

SEQ ID NO: 1626 - DNA, 26 bp, Artificial Sequence
  Synthetic DNA Sequence
aggaatgattaagcccccttcaaaaa

SEQ ID NO: 1627 - DNA, 26 bp, Artificial Sequence
  Synthetic DNA Sequence
ttacattgcgaccatgaaattgctct

SEQ ID NO: 1628 - DNA, 1658 bp, Staphylococcus aureus
atgcttaaaatcgacatgaagaatgtaaaaaaatattatgcagataaattaattttaaatataaaagaactaaagatttatagtggggataaaataggtattgtaggtaagaatggagttggcaaaacaacacttttaaaaataataaaaggactaatagagattgacgaaggaaatataattataagtgaaaaaacaactattaaatatatctctcaattagaagaaccacatagtaagataattgatggaaaatatgcttcaatatttcaagttgaaaataagtggaatgacaatatgagtggtggtgaaaaaactagatttaaactagcagagggatttcaagatcaatgttctttaatgctcgtagatgaacctacaagtaatttagatatcgaaggaatagagttgataacaaatacttttaaagagtaccgtgatacttttttggtagtatctcatgatagaatttttttagatcaagtttgtacaaaaatttttgaaattgaaaatggatatattagagaattcatcggtaattatacaaactatatagagcaaaaagaaatgcttctacgaaagcaacaagaagaatacgaaaagtataattctaaaagaaagcaattggagcaagctataaagctaaaagagaataaggcgcaaggaatgattaagcccccttcaaaaacaatgggaacatctgaatctagaatatggaaaatgcaacatgctactaaacaaaaaaagatgcatagaaatacgaaatcgttggaaacacgaatagataaattaaatcatgtagaaaaaataaaagagcttccttctattaaaatggatttacctaatagagagcaatttcatggtcgcaatgtaattagtttaaaaaacttatctataaaatttaataatcaatttctttggagagatgcttcatttgtcattaaaggtggagaaaaggttgctataattggtaacaatggtgtaggaaaaacaacattgttgaagctgattctagaaaaagtagaatcagtaataatatcaccatcagttaaaattggatacgtcagtcaaaacttagatgttctacaatctcataaatctatcttagaaaatgttatgtctacctccattcaagatgaaacaatagcaagaattgttctagcaagattacatttttatcgcaatgatgttcataaagaaataaatgttttgagtggtggagaacaaataaaggttgcttttgccaagctatttgttagcgattgtaatacattaattcttgatgaaccaacaaactatttggatatcgatgctgttgaggcattagaagaattgttaattacctatgaaggtgttgtgttatttgcttcccatgataaaaaatttatacaaaacctagctgaacaattgttaataatagaaaataataaagtgaaaaaattcgaaggaacatatatagaatatttaaaaattaaagataaaccaaaattaaatacaaatgaaaaagaactcaaagaaaaaaagatgatactagaaatgcaaatttcatcattattaagtaaaatctcaatggaagaaaatgaagaaaaaaacaaagaattagatgaaaagtacaaattgaaattaaaagaattgaaaagcctaaataaaaatattta

SEQ ID NO: 1629 - DNA, 26 bp, Artificial Sequence
  Synthetic DNA Sequence
aaggggaaagtttggattacacaaca

SEQ ID NO: 1630 - DNA, 24 bp, Artificial Sequence
  Synthetic DNA Sequence
gaaccacagggcattatcagaacc

SEQ ID NO: 1631 - DNA, 21 bp, Artificial Sequence
  Synthetic DNA Sequence
cgacgatgctttatggtttgt

SEQ ID NO: 1632 - DNA, 26 bp, Artificial Sequence
  Synthetic DNA Sequence
gttaatttgcctatcttgtcacactc

SEQ ID NO: 1633 - DNA, 900 bp, Staphylococcus aureus
atggaatttaaattacaagaattaaatcttactaaccaagatacaggaccatatggtataaccgtttcagataaggggaaagtttggattacacaacataaagcaaatatgataagttgcatcaatttagatggaaaaattacagagtacccactaccgacaccagatgcaaaagtcatgtgtttaactatatcctcagatggggaagtttggtttactgagaatgcagcaaacaaaatagggaggattacaaaaaaagggattattaaggaatatacattgcctaacccagattcagcaccctacggtattacagaaggaccaaatggagatatatggtttacagaaatgaatggcaaccgtattggacgtattacggacgacggtaaaattcgtgaatacgagctgcctaataaaggatcttacccttcttttatcactttgggttctgataatgccctgtggttcacagaaaatcaaaataatgctattggtagaattacagaaagtggggatattacagagtttaaaattcctacacctgcatcaggaccagttggtattacaaaggggaacgacgatgctttatggtttgtggaaattatcggtaataagatagggcgaataactcctctgggggaaattaccgaattcaaaattccaacgccaaacgctcgacctcatgcaattactgctggagcaggaattgatttatggtttactgaatggggggctaataaaataggaaggctgacaagcaataatataattgaggaatacccaattcaaatcaaaagtggtgaaccacatggcatttgtttcgatggtgaaacaatttggtttgcaatggagtgtgacaagataggcaaattaactctcattaaggataatatggagtga

SEQ ID NO: 1634 - DNA, 25 bp, Artificial Sequence
  Synthetic DNA Sequence
ttaacttgtctattcccgattcagg

SEQ ID NO: 1635 - DNA, 23 bp, Artificial Sequence
  Synthetic DNA Sequence
gctgtggcaatggatattctgta

SEQ ID NO: 1636 - DNA, 24 bp, Artificial Sequence
  Synthetic DNA Sequence
ttcctacccctgatgctaaagtga

SEQ ID NO: 1637 - DNA, 23 bp, Artificial Sequence
  Synthetic DNA Sequence
caaagtgcgttatccgaacctaa

SEQ ID NO: 1638 - DNA, 527 bp, Aspergillus fumigatus
  strain WSA-172
ggtggggaagactgtcttcatccaggaattgattgtgagtcgttccacatgctcacctagttttcgctcgatcttttcactaacgcaaaccatgtagaacaacattgccaaggcccacggtggttactccgtcttcactggtgttggtgagcgtactcgtgagggtaacgatctgtaccacgaaatgcaggagactggtgtcattcagctcgagggtgaatccaaggtcgcactggtgttcggacagatgaacgagccccccggtgcccgtgcccgtgtcgcccttaccggtctgaccattgccgagtacttccgtgacgaggagggtcaggacgtgctgctcttcattgacaacattttccgtttcacccaggccggttctgaggtgtctgcccttctcggtcgtatcccctctgccgtcggttaccagcccaccctggccgtcgacatgggtggtatgcaggagcgtatcaccaccaccaagaagggttctattacctccgtccargccgtctacgtccccgcga

SEQ ID NO: 1639 - DNA, 452 bp, Aspergillus fumigatus
  ref <308>: DATABASE ACCESSION NUMBER: ATCC 64746
actgtcttgattcaagaacttattaacaacattgctaaagcccatggtggttactctattttctgtggtgttggtgaacgtactcgtgaaggtaacgatttataccacgaaatgatggaaactggtgtcattaaacttgaaggtgactccaagtgtgctcttgtattcggtcaaatgaacgaacctcctggtgctcgtgcccgtgttgctttaactggtttaaccattgctgaatacttccgtgatgaagaaggtcaagatgtgttacttttcattgataacattttccgtttcactcaagctggttctgaagtatctgcccttttaggtcgtattccatctgctgtaggttaccaacccactttatctactgatatgggtggtatgcaagaacgtattactactaccaagaatggttccattacctctgtacargccgtctacgtccccgc

SEQ ID NO: 1640 - DNA, 783 bp, Bacillus mycoides
  ref <308>: DATABASE ACCESSION NUMBER: ATCC 6462
acgcccttacggtaaaacaaagcaacgaaaacggaagcatgaacttaacatttgaagttgcacttcatttaggtgatgatacagttcgtacagttgcgatgtcttccacagatggacttgttcgtggcacagaagtagaagatactggtaaagcaatctctgtaccagttggtgatgcaacacttggtcgtgtattcaacgtattaggtgatgcaattgacttagatggtgaacttcctgcggatgtacaccgtgatccaattcaccgtcaagcacctgcattcgaagaattatctactaaagtagaaattcttgaaactggtattaaagtagtagacttacttgctccttacattaagggtggtaagatcggcctattcggtggtgccggcgtaggtaaaacagtattaattcaagaattaattaacaacatcgcacaagagcacggtggtatctctgtattcgctggtgtaggtgagcgtactcgtgagggtaatgacttataccatgaaatgagcgattctggcgtaatcaagaaaactgcgatggtattcggacaaatgaatgagccacctggagcacgtcaacgtgttgcattaacaggtttaacaatggctgagcatttccgtgatgagcaaggacaagacgtacttctgttcatcgataacatcttccgtttcacgcaagcgggttctgaagtatctgcccttcttggtcgtatgccatctgcggtaggttaccaaccaacacttgcaacagaaatgggtcaattacaagagcgta

SEQ ID NO: 1641 - DNA, 823 bp, Bacillus mycoides
  NRRL NRS-319
atctacaacgcccttacggtaaaacaaagcaacgaaaacggagcaagcattaacttaacatttgaagttgcacttcatttaggtgatgacacagttcgtacagttgcaatgtcttccacagatggacttgttcgtggcacagaagtagaagatactggtaaagcaatctctgtaccagttggtgatgcaacacttggtcgtgtattcaacgtattaggtgatgcaattgacttagatggtgatgttcctgcggatgtacgtcgtgatccaattcaccgtcaagcacctgcattcgaagaactatctactaaagtagaaattcttgaaactggtattaaagtagtagacttacttgctccttacattaagggtggtaagatcggtctattcggtggtgccggtgtaggtaaaacagtattaattcaggaattaattaacaacatcgcacaagaacacggtggtatctctgtattcgctggtgtaggtgagcgtactcgtgagggtaacgacttataccatgaaatgagcgattctggcgtaattaagaaaactgcgatggtattcggacaaatgaatgagccacctggagcacgtcaacgtgttgcattaacaggtttaacaatggctgaacatttccgtgatgagcaaggacaagacgtactattgttcatcgataacatcttccgtttcacgcaagcaggttctgaagtatctgcccttcttggtcgtatgccatctgcggtaggttaccaaccaacacttgcaacagaaatgggtcaattacaagagcgtattacatctacaaataaaggatctatcacgt

SEQ ID NO: 1642 - DNA, 829 bp, Bacillus mycoides
  NRRL BD-15
gatggcggaaagctaccagaaatctacaacgcccttacggtaaaacaaagcaacgaaaacggagcaaacattaacttaacatttgaagttgcacttcatttaggtgatgatacagttcgtacagttgcgatgtcttccacagatggacttgttcgtggcacagaagtagaagatactggtaaagcaatctctgtaccagttggtgatgtaacacttggtcgtgtattcaacgtattaggtgatgcaattgacttagatggtgaagttcctgcggatgtacgtcgtgatccaattcaccgtcaagcacctgcattcgaagaattatctactaaagtagaaattcttgaaactggtattaaagtagtagacttacttgctccttacattaagggtggtaagattggtctattcggtggtgccggtgtaggtaaaacagtattaattcaggaattaattaacaacatcgcacaagaacacggtggtatctctgtattcgccggtgtaggtgagcgtactcgtgaaggtaacgacttataccacgaaatgagcgattctggcgtaattaagaaaactgcgatggtattcggacaaatgaacgagccacctggagcacgtcaacgtgttgcattaacaggtttaacaatggctgagcatttccgtgatgagcaaggacaagacgtactactgttcatcgataacatcttccgtttcacgcaagcaggttctgaagtatctgcccttcttggtcgtatgccatctgcggtaggttaccagccaacacttgcaacagaaatgggtcaattacaagagcgtattacatctacaaata

SEQ ID NO: 1643 - DNA, 823 bp, Bacillus pseudomycoides
  NRRL BD-10
aatctacaatgcccttacggtaaaacaaagcaacgaaaacggagcaagcattaacttaacatttgaagttgcacttcatttaggtgatgacacagttcgtacagttgcgatgtcttccacagatggacttgttcgtggcacagaagtagaagatactggtaaaccaatctctgtaccggttggtgatgcaacacttggtcgtgtatttaacgtattaggtgatgcaattgacttagatggtgaagttcctgcggatgtacgccgtgatccaattcaccgtcaagcacctgcgttcgaagagttatctacgaaagtagaaattcttgaaactggtattaaagtagtagacttacttgctccttacattaaaggtggtaaaatcggtctattcggtggtgccggtgtaggtaaaacagtattaatccaggaattaattaacaacatcgcacaagagcacggtggtatttctgtattcgctggtgtaggtgagcgtactcgtgaaggtaatgacttataccacgaaatgagcgattctggcgtaatcaagaaaacagcgatggtattcggacaaatgaacgagccacctggtgcacgtcaacgtgttgcattaacaggattaacaatggctgaacatttccgtgatgagcaaggacaagacgtactattgttcatcgataacatcttccgtttcacgcaagcgggttctgaagtatctgcccttcttggtcgtatgccatctgcggtaggttaccaaccaactcttgcaacagaaatgggtcaattacaagagcgtattacatctacaaataaaggatctatcacg

SEQ ID NO: 1644 - DNA, 708 bp, Bacillus pseudomycoides
  NRRL B-617
ggaaagctacctgaaatctacaatgcccttagaattaaacaagacgcagttaacttaactttagaagttgcacttcacttaggtgatgatacagttcgtacagttgcgatgtcttccacagacggacttgttcgtggtactgcagtagaagatactggcaaagcgatttctgttccagttggtgatgcaacacttggtcgtgtatttaacgtattaggtgatgcaattgacttagatggtgaggttccagcagatgtacgccgtgatccaattcaccgtcaagcacctgcattcgaagagttatctacaaaagtagaaattcttgaaactggtattaaagtagtagacttacttgctccttacattaaaggtggtaaaatcggtctattcggtggtgccggtgtaggtaaaacagtattaattcaggaattaattaacaacatcgcacaagagcacggtggtatctctgtattcgctggtgtaggtgagcgtactcgtgaaggtaacgacttataccatgaaatgagcgattctggcgtaatcaagaaaactgcgatggtattcggacaaatgaacgagccacctggtgcacgtcaacgtgttgcattaacaggtttaacaatggctgaacatttccgtgatgagcaaggacaagacgtactattgttcatcgataacatcttccgtttcacgcaagcgggttctgaa

SEQ ID NO: 1645 - DNA, 778 bp, Budvicia aquatica
  ref <308>: DATABASE ACCESSION NUMBER: ATCC 35567
gtacgatgcgcttgaagttcaaaacgatgtcaaactagtgctggaagttcaacagcagctcggtggtggtgtcgttcgttgtatcgctatgggtacctcagatggcctaagccgcggtctgaaagtacttgatttagaacaccctatcgaagttcctgtcggtgtggcaactctgggccgtattatgaacgtgcttggtgagcctatcgatatgaagggtgacattggtgaagaagagcgttgggctatccatcgcgctgcaccaagctacgaagatttatccagtgctaacgaactgctggaaacgggcatcaaggttatcgacctgatttgtccgtttgccaaaggcggtaaagttggtctgtttggtggtgccggcgtaggtaaaacggtaaacatgatggagctgattcgtaatattgcgactgagcactcaggttactctgtatttgccggcgttggtgagcgtactcgtgagggtaatgacttctaccacgaaatgacagaatctaacgtattagacaaagtatctctggtttatggccaaatgaatgagccaccgggaaaccgtctgcgcgttgcgttaaccggcctgaccatggcggaaaaattccgtgatgaaggccgtgacgttctgctgtttatcgataacatttatcgttataccttagccggtacagaagtatcagcactgttaggtcgtatgccatcagcggtaggttaccaaccaacgctggcggaagagatgggtacactgcaagaacgtatcacytcaacc

SEQ ID NO: 1646 - DNA, 806 bp, Buttiauxella agrestis
  ref <308>: DATABASE ACCESSION NUMBER: ATCC 33320
gatgccgtaccaaaagtgtacgacgctcttgaggttacaaatggtaaagaccgtctggtgctggaagttcagcaacagttaggtggtggcgtagtgcgtactatcgccatgggtacttctgatggtttgcgtcgtggtctggaagtttctaacctcgatcacccaattgaagtgccagtaggtaaagcaactctgggccgtatcatgaacgtcctgggcgagcctatcgacatgaaaggcgatatcggcgaagaagagcgttgggcgattcaccgtgctgctcctagctacgaagaactgtctagctcccaggatctgctggaaaccggcatcaaagtaatggacctgatttgcccgttcgctaagggtggtaaagtcggtctgttcggtggtgcgggtgtgggtaaaactgtaaacatgatggagctgatccgtaacatcgcgatcgagcactccggttactcagtgtttgcaggcgtgggggaacgtactcgtgagggtaacgacttctaccatgaaatgaccgattccaacgttctggacaaagtatcactggtttatggccagatgaacgagccaccaggtaaccgtctgcgcgttgcgttgaccggtctgaccatggctgagaagttccgtgacgaaggtcgtgacgttctgctgttcgttgataacatttaccgttataccctggccggtacagaagtatctgcgctgctgggtcgtatgccatctgcggtaggttaccagccaactctggcagaagagatgggtgttttgcaggagcgtattacctccaccaaaactgg

SEQ ID NO: 1647 - DNA, 1122 bp, Candida norvegica
  ref <308>: DATABASE ACCESSION NUMBER: ATCC 36586
gaaaccgttgttgacactggttccccaatcaccgtcccagttggtcgtgaaaccttgggtcgtatcattaacgttatcggtgaaccaatcgatgaacgtggtccaatcaacaccaagcaaagaaacccaatccatgctgatcctccttcatttgctgaacaatccacttctgctgaagttttagaaaccggtattaaagttgtcgatttattggctccttatgccagaggtggtaaaattggtttattcggtggtgccggtgtcggtaaaaccgtctttatccaagaattgattaacaacattgctaaagctcatggtggtttctcagtcttcaccggtgtcggtgaaagaaccagagaaggtaacgatttataccgtgaaatgaaagaaaccggtgtcattaacttggaaggtgactctaaagtcgctttagtcttcggtcaaatgaacgaacctccaggtgctagagcccgtgttgccttaaccggtctaaccattgctgaatacttcagagatgaagaaggtcaagatgtcttgttattcgttgataacattttcagattcacccaagctggttcagaagtctctgccttattaggtcgtattccatctgctgtcggttatcaaccaaccttggccactgatatgggtttgttgcaagaacgtatcaccaccaccagaaaaggttccgtcacttctgtccaagctgtttatgtcccagctgatgatttgactgatcctgccccagccaccactttcgcgcatttggatgctactactgtcttgtctcgtggtatctcagaattgggtatctacccagctgtcgatccattggattccaaatcaagattattagatgccgctgttgttggtcaagaacattacgatgttgctactcaagttcaacaaactttacaagcctacaaatctttacaagatattatcgctattttaggtatggatgaattatcagaacaagataaattgaccgttgaaagagctagaaagatccaacgtttcttatctcaaccatttgctgtcgctgaagttttcactggtattccaggtagattagttagattgaaagaaaccgttgcttcattcagagacgttttagctggt

SEQ ID NO: 1648 - DNA, 813 bp, Streptococcus pneumoniae
  ref <308>: DATABASE ACCESSION NUMBER: ATCC 700677
tacgtctcttaccctgacgatgatttgcaagtcgcatctacggtcgtagatgtttcaaatggtaaagtcatcgcccaacttggagctcgtcaccaagcaagtaacgtttcatttggtaccaaccaagctgtggaaaccaatcgtgactggggatcaactatgaaaccaatcacagactatgctcctgccttggagtacggtgtctacgattcaactgctactatcgttcacgatgagccctataactaccctgggacagatatccctctctataactgggatcgagcatatttcggtaatattactctgcaatatgcccttcaacaatctcgtaacgtacctgccgttgaaacactaaacaaggtcggtctagataaggctaaaaccttccttaatggtcttggtatcgactatccaagcatgcattatgcaaacgccatttcaagtaatacaactgaatccaacaaaaaatatggtgcaagtagtgaaaaaatagctaccgcctatgccgcattcgcaaatggtggtatttaccacaaaccaatgtacatcaataaagttgtctttagcgatggtagcgaaaaagaattttctgaccctggcacaagagccatgaaagaaacgactgcttacatgatgacagaaatgatgaaaacagtctggacgtacggaactggtcgtggtgcctacctgccttggcttcctcaagctggtaaaacaggtacctctaactatactgacgaagaaattgaaaagtatatcaagaacactggttacgtagctccagatgaaatgtttgtgggttatacccgt

SEQ ID NO: 1649 - DNA, 813 bp, Campylobacter lari
  ref <308>: DATABASE ACCESSION NUMBER: ATCC 43675
attaatgaagctattgttgttaattatgaattagaaggaaaagaatgcaagctagttcttgaagtagctgcacatttaggcgataataaagtaagaaccatcgctatggatatgacagatggtcttgttagaggtttaacagccgtcgcaactggaaatccaattagtgttccagtaggcgaaaaagttcttggaagaatttttaatgtaacgggtgatttgattgatgagggcgaagaaatcaattttgataagcactggtcaattcatagagatccacctccatttgaagaacaaagtacaaaaagcgaaatctttgaaacaggtataaaggttgttgatttgctagctccttatgctaaaggtggaaaagttggtctttttggtggtgcaggtgttggtaaaaccgttattattatggaattaattcacaatgttgcatttaaacatagcggatattctgtttttgcaggtgttggcgaaagaactcgtgagggtaatgacctttacaatgaaatgaaagaaagtaatgtattagataaagttgcattgtgttatggtcaaatgaatgaaccaccaggggcaagaaatcgtatagctttaacaggtcttactatggctgagtattttagagatgaaatgggacttgatgttttaatgattattgataatattttcagattttctcaatcaggctcagaaatgtcagcacttttaggaagaattccttcagctgttggttatcaaccaaccttagctagtgaaatgggtaagttccaagaaagaattacttcaaccaagaaaggatctatt

SEQ ID NO: 1650 - DNA, 570 bp, Coccidioides immitis
  strain WSA-222
ggtggggaagactgtgttcattcaggaattgattgtaagttctgttatcaactaaagccgacagcggttgctgatatgctctagaacaacattgctaaggctcacggtggttactccgtgttcactggtgtcggtgagcgtacccgtgagggtaacgatttgtaccatgaaatgcaagagacccgtgtcattcaactcgacggagagtccaaggtcgctcttgtcttcggtcaaatgaacgagccccctggtgcccgtgcccgtgttgcccttaccggtttgaccattgctgaatacttccgtgacgaggaaggccaagacggtaggcttcatgcttctatcgctaggggcgtgtgatacaggaggctaatcgcttttctagtgcttctctttattgacaacattttccgtttcactcaagctggttctgaagtgtctgccttgctcggtcgtattccttccgctgtcggttaccaacctactctcgccgtcgacatgggtgttatgcaggaacgtatcaccaccaccaccaagggatccattacttcagtgcargccgtctacgtcccc

SEQ ID NO: 1651 - DNA, 560 bp, Emmonsia parva
  ref <308>: DATABASE ACCESSION NUMBER: ATCC 10784
tgtcttcatccaggagttaattgtacgttttttgtctgcctactataatagacgaagaaatattttgatttatttttctaataattcaaatagaacaacattgccaaagcccacggtggttactctgtcttcactggtgttggcgagcggacccgtgaaggaaacgatctgtaccacgaaatgcaggagacccgtgtcatccagctcgatggcgagtccaaggtcgccctcgtcttcggtcaaatgaacgaaccccccggagcccgtgcccgtgttgccctcactggtctgaccgttgctgaatacttccgtgacgaggaaggtcaagatggtgcgtatatatatattcgccagtaatttgactcgaagctccactcacacatatattagtgctcctcttcatcgacaacattttccgcttcacccaggcaggttccgaagtgtccgccctgctcggccgtatcccctccgccgtcggttaccagcccaccctcgctgtcgacatgggtatgatgcaggaacgtatcaccaccaccaccaagggctccatcacctccgtg

SEQ ID NO: 1652 - DNA, 780 bp, Erwinia amylovora
  ref <308>: DATABASE ACCESSION NUMBER: ATCC 14976
ccacaagtgtacagcgcccttgaggttaaaaatggtgatgctcgtctggtgctggaagttcagcagcagctgggcggtggcgtggttcgtaccatcgccatgggttcttcagacggccttaagcgtggtctggaagccgttgaccttcagcacccaattgaagtaccggtaggtactgccacacttggccgtatcatgaacgtgctgggtgagccgatcgatatgaaaggcgacattggcgaagaagagcgctgggcgattcaccgctctgcaccttcttacgaagatcagtcgaactctcaggatctgctggaaaccggcatcaaggtgattgacctgatgtgtccgttcgccaagggcggtaaagtcggcttgttcggtggtgcgggcgtaggtaaaaccgtcaacatgatggagcttattcgtaacattgcggctgagcactcaggtttctcggtatttgccggtgtgggtgagcgtacccgtgaaggtaacgacttctaccacgaaatgaccgactccaacgttatcgacaaagtttcgctggtctatggtcagatgaacgagccaccgggtaaccgtctgcgcgttgcgctgaccggtctgaccatggcggagaagttccgtgacgaaggtcgtgacgtactgctgtttatcgataacatctatcgttacaccctggccggtactgaagtctccgctctgctgggtcgtatgccttctgcggtaggttaccagccaacgctggcggaagagatgggcgttctgcaggaacgtatc

SEQ ID NO: 1653 - DNA, 545 bp, Fonsecaea pedrosoi
  ref <308>: DATABASE ACCESSION NUMBER: ATCC 18831
tgtgttcattcaggagctgattgtgagtaccccggagattttcctgcgattgcgcatgaagcaagcgctgacgtccatctagaacaacatcgccaaggctcacggtggttactccgtgttctgcggtgtcggcgagcgtactcgtgagggtaacgatttgtaccacgaaatgcaggagaccggtgtcatcaacctcgagggcgagtccaaggtcgcccttgtcttcggtcagatgaacgagcccccgggagcccgtgcccgtgtcgcccttactggtcttaccgtcgctgagtaagttttgacaaccagaagcgagtattgccacaattactgactaaaaatcaagatatttccgtgacgaggagggccaggatgtgcttctcttcattgacaacattttccgtttcacccaggccggttctgaggtgtccgctcttctcggccgtattccctctgccgtcggttaccagcccactctcgccgtcgacatgggtatgatgcaggagcgtatcaccaccacccagaagggttccatcacttccgtc

SEQ ID NO: 1654 - DNA, 564 bp, Fusarium moniliforme
  strain WSA-213
tgtgtttattcaggagctcatcaacaacatcgccaaggcccacggtggttactctgtcttcactggtgtcggtgagcgaacccgtgagggtaacgatctgtaccacgaaatgcaggagacttccgttattcagcttgatggcgagtccaaggttgccctggttttcggtcagatgaacgagccccctggagctcgtgcccgtgtcgctcttaccgggtaagttgatagatagtgccttcccttcctgtttcaacacctcaacaccaccactccccaagacattgctactcatactgcaccatgatattatatttacgcctcttggacgctagctaatgttgtatcgacagtttgactgttgctgagtacttcagagacgaggagggtcaggacgtgctgcttttcattgacaacattttccgattcactcaggccggttccgaggtgtctgcccttctcggtcgtatcccctctgccgtcggttaccagcccactctggccgtcgacatgggtggtatgcaggagcgtattaccaccaccaccaagggttccattacctcagtc

SEQ ID NO: 1655 - DNA, 776 bp, Klebsiella oxytoca
  ref <308>: DATABASE ACCESSION NUMBER: ATCC 13182
cgtaccgcgcgtgtacgaggctcttgaggtacaaaatggtagtgagaatctggtgctggaagttcagcagcagctcggcggcggtattgttcgtaccatcgccatgggttcttccgacggtctgcgtcgcggtctggaagtcaaagacctcgagcatccgatcgaagtcccggtaggtaaagcaacgctgggtcgtatcatgaacgtactgggccaaccggtagacatgaaaggcgacatcggcgaagaagagcgttgggcgattcaccgcgcagcgccttcctacgaagagttgtcaaactctcaggaactgctggaaaccggcatcaaagttatcgacctgatgtgtccgtttgcgaagggcggtaaagttggtctgttcggtggtgcgggtgtaggtaaaaccgtaaacatgatggagctgatccgtaacatcgcgatcgagcactccggttactccgtgtttgcgggcgtaggtgaacgtactcgtgagggtaacgacttctaccacgaaatgaccgactccaacgttatcgataaagtatccctggtgtatggccagatgaacgagccgccgggaaaccgtctgcgcgttgcgctgaccggcctgaccatggctgagaagttccgtgacgaaggtcgtgacgttctgctgttcgtcgataacatctatcgttacaccctggccggtactgaagtatccgcactgctgggtcgtatgccttcagcggtaggttaccagccgactctggcggaagagatgggcgttctgcagg

SEQ ID NO: 1656 - DNA, 572 bp, Microsporum audouinii
  ref <308>: DATABASE ACCESSION NUMBER: ATCC 11347
gtgttcatccaggagttgattgtaagtgattatattcccctagaaagaaatgttttgaacaaaagtctcgaattagaaaattcttttcagatactaatttactatagaacaacattgccaaggctcacggtggttactccgtcttcaccggtgtcggagagcgaacccgtgaaggaaacgatctgtaccatgaaatgcaggaaactcgtgtcatccaacttgatggcgagtccaaggtcgccctggtcttcggtcagatgaacgagcccccaggtgcccgtgcccgtgttgctcttactggtttgaccattgctgagtacttccgtgatgaggaaggtcaagacggtatgttctttaaattagatatcttctggagaaacagcgtctaacaaattcttccagtgcttctcttcatcgacaacatcttccgtttcactcaggctggttccgaagtgtctgccctgcttggtcgtattccatctgccgtcggttaccaacccactcttgccgtcgacatgggtggtatgcaggaacgtattaccaccaccaagaagggatccattacctccgtc

SEQ ID NO: 1657 - DNA, 790 bp, Obesumbacterium proteus
  ref <308>: DATABASE ACCESSION NUMBER: ATCC 12841
gcctaaagtgtataacgcacttgaggtgaaaggcggtgccactaaactggtactggaagttcagcagcagctaggcggcggcgttgtacgctgtatcgctatgggtacttctgacggtctgcgtcgcggactggacgttgttgacctggagcacccgattgaagtcccagtaggtaaagcgaccttaggccgcattatgaacgtactgggtgagccaattgatatgaagggtgatatcggcgaagaagatcgctgggctattcaccgtgaagctccaagctacgaagaactgtctaactcgcaagaactgctggaaaccggtatcaaggtaatggacttgatttgtccgttcgctaagggcggtaaagtcggtctgttcggtggtgcgggtgttggtaaaacagtaaacatgatggagctgatccgtaacatcgcgatcgagcactcaggttactctgtatttgccggcgtgggtgaacgtactcgtgagggtaacgacttctaccacgaaatgaccgactccaacgtattggacaaagtatcactggtttatggccagatgaacgagccaccaggaaaccgtctgcgcgttgcgctgaccggtctgactatggctgagaagttccgtgacgaaggtcgtgacgtactgctgttcatcgataacatctaccgttataccttggccggtaccgaagtatctgcactgctgggtcgtatgccttctgcggtaggttatcagccaacgctggcggaagagatgggtgttctgcaagaacgtatcacctctacc

SEQ ID NO: 1658 - DNA, 622 bp, Paracoccidioides brasiliensis
  ref <308>: DATABASE ACCESSION NUMBER: ATCC 200443
tgtcttcattcaggagcttatcaacaacatcgccaaggcccacggtggttactccgtcttcactggtgtgggagagcgcactcgtgagggaaacgacttgtatcacgagatgcaagagacttccgttatccagctcgaaggcgaatccaaggttgccctcgtcttcggtcaaatgaacgagcctccgggtgctcgtgctcgtgttgctctcaccggtcgtaagtgctccttcccagatttctcttccccagtttctggacccactttttccttccaccaccattctactgggtaggaccaagatagcactgcctattctggtgccttcctaccgcctactctactgcctattccaccaccttttctaccgcctcttctacttgctattgtatactaacttactcaaacagttactattgctgagtacttccgtgacgctgagggccaggatgtgcttctcttcatcgacaacattttccgtttcacccaggccggttccgaggtgtccgctcttctcggtcgtatcccctccgccgtcggttaccagcccacccttgccgtcgacatgggtggtatgcaggagcgtatcaccaccaccaagaagggatccattacctccgtc

SEQ ID NO: 1659 - DNA, 794 bp, Plesiomonas shigelloides
  ref <308>: DATABASE ACCESSION NUMBER: ATCC 14029
gacgctgtacctcaggtgtacgatgcactgacagttgagggtgctgagctggtactggaagtgcagcagcagctgggtggtggtgttgttcgctgtatcgcgatgggtgcctctgatggcctcaagcgcggtctgaaagcgcacaatactggtgctcctatcactgtaccggtgggtgtggaaacactgggccggatcatggatgtgttgggtaacccgattgaccagaaaggtccaatcggtgaacaagatcgctgggtgatccaccgtgaagcaccaagctacgaagatcaggctaacagcactgaactgctggaaaccggtatcaaggttatcgacctggtatgcccgtttgcgaaaggcggtaaagtcggtctgttcggtggtgccggtgtaggtaaaaccgtaaacatgatggagctgatccgtaacatcgcgatcgagcactccggttattccgtgtttgcgggcgtgggtgagcgtacccgtgaaggtaacgacttctaccacgaaatgacagactccaacgtactggacaaagtatccctggtgtacggtcagatgaacgagccgccaggtaaccgtctgcgcgtagcactgaccggcctgaccattgcggagaaattccgtgatgaaggtcgtgacgtactgctgttcatcgataacatctaccgttataccctggcggggaccgaagtatcggcactgctgggccgtatgccttctgcggtaggttatcagccaacgctggcggaagagatgggtgtactgcaagagcgtattacctctacccg

SEQ ID NO: 1660 - DNA, 799 bp, Shewanella putrefaciens
  ref <308>: DATABASE ACCESSION NUMBER: ATCC 8071
aggtatatgacgctstgaagatcacaggtgaaggcgcctgtaatggtttggtgctggaagttcagcaacagctaggcggtggtgtagttcgtactatcgctatgggttcttctgatggtctgcgtcgtggtcttgaggttgttaactcaggttcacctatttctgttcctgttggtaccgccacgcttggccgtatcatgaacgtattaggtgagcctattgatgaagcgggtccaatcggtgaagaagagcgttatgttattcaccgtgcagcaccttcatatgaagatcaatcgaacactactgaactgttagagacaggtatcaaggttattgaccttgtttgtccattcgctaagggtggtaaagtaggtctgttcggtggtgcgggtgttggtaaaacagttaacatgatggaactgattaacaacatcgctaaagctcactcgggtctttcggtgttcgccggtgtgggtgaacgtactcgtgaaggtaacgacttctactacgagatgaaagattctggcgttctcgacaaagtggccatggtttatggtcagatgaacgagccaccaggaaaccgtttacgcgtagcactgtcaggtctgacaatggctgagaagttccgtgacgaaggtcgtgacgtattgttgttcgttgacaacatctaccgttataccttagccggtactgaagtatctgcactgttaggccgtatgccttctgcggtaggttatcaaccaacattggctgaagaaatgggcgttctgcaagagcgtattacttcaactaagacggg

SEQ ID NO: 1661 - DNA, 18 bp, Artificial Sequence
  Synthetic DNA Sequence
tgggaagcgaaaatcctg

SEQ ID NO: 1662 - DNA, 774 bp, Campylobacter curvus
  ref <308>: DATABASE ACCESSION NUMBER: ATCC 35224
ctatgcctcaaactagagagcatatcttgctatctcgccaagtaggcgttccatatatcgttgtatttatgaacaaagccgatatggtcgatgacgctgagcttcttgagctagtcgagatggaaattcgcgagcttcttaacgagtacaacttccctggcgatgatactcctatcatatcaggttctgctcttaaagccctcgaagaggctaaagcaggcgttgatggcgagtggtcagcaaaagttcttgagcttatggataaagtcgatgagtatatcccaactccagttcgtgctaccgataaagacttcctgatgcctatcgaagacgttttctctatctcaggtcgtggaacggtcgttactggtaggatcgaaaaaggtgtcgtaaaagttggcgatactatcgagatcgttggtatcaaacctactcaaactacgacagttactggcgttgagatgtttaggaaagagatggaacaaggcgaggccggtgataacgtaggtgttcttttaagaggtactaaaaaagaagacgtcgagcgcggcatggttctttgtaagccaaaatcaatcactcctcatacaaaatttgagggtgaggtttatatcctaacaaaagaggaaggcggacgccacactccattctttaacaactatagaccacaattttatgtaagaacaacagacgttacaggttctatcacacttccagaaggaactgagatggttatgcctggagataatgtcagaatttccgttgaactcatcg

SEQ ID NO: 1663 - DNA, 791 bp, Campylobacter rectus
  ref <308>: DATABASE ACCESSION NUMBER: ATCC 33238
ttctgcggctgacggcccaatgccacaaactagagagcacatcttgctatctcgccaagtaggcgttccgtatatcgttgtttttatgaacaaagccgatatggtcgatgatgccgagcttcttgagctggttgagatggagattcgcgagcttctaaacgagtatgatttccctggtgacgatactccaatcgtagcaggctctgctcttcaagctcttaatgaagccaaagccggaacagaaggcgagtggtctgcaaaaattcttgagcttatggctaaagttgacgagtatatcccgactccggttcgtgcaacggataaagacttcttgatgcctattgaggacgttttctctatctccggtcgcggcaccgtcgttaccggcagaatcgaaaaaggtatcgtaaaagtcggtgatactatcgagatcgtaggtatccgcgatactcaaacaactaccgttaccggcgttgagatgttcagaaaagagatggatcaaggcgaagcgggcgataacgtaggcgttcttctaagaggcactaaaaaagaagacgttgagcgcggtatggttctttgcaaacctaaatcaatcactcctcacactaaatttgagggagaggtttatatcttaactaaagaggaaggcggacgccatactccattctttaataactatagaccgcagttttatgtaagaactaccgacgttaccggttctatcactcttccggaaggaacagagatggttatgcctggcgataacttaaagataagcgttgagcttatcg

SEQ ID NO: 1664 - DNA, 810 bp, Fonsecaea pedrosoi
  ref <308>: DATABASE ACCESSION NUMBER: ATCC 18831
cgacggacagatgccccagaccagggagcacttgctcctcgcccgccaggtcggtgtcaagcgcattgtcgtcttcgtcaacaaggtcgatgccattgaggacaaggagatgttggagctcgtcgagatggagatgcgtgagcttctctccagctacggcttcgagggtgacgacactcccatcgtcatgggttccgccctttgcgccattgagggccgcgagcccgacattggtgtcgagaagattgacgagctcctcgagcacgtcgacacctggatccccacccccgagcgtgacatcgccaagcctttcctcatgtccgttgaggacgtcttctccattcccggccgtggtaccgtcgcttctggccgtgtcgagcgtggtgtcctgaagaaggattccgaagtcgagcttgtcggcaagaacaagaaccccatcaagaccaaggttaccgacatcgagaccttcaagaagtcttgcgacgagtcccgcgctggtgacaactccggtctccttctccgtggtgtcaagcgtgacgatgtcctccgtggcatggtcgttgtccagcccggcaccaccaaggcccacaagaagttccttgcctccatgtacgtcctcaccaaggaggagggtggccgccacactggtttcgccaacaactacaagccccagatgttcatccgtaccgccgatgaggccgccactcttacctggcccgagggtaccgaggaggacaagatggtcatgcccggtgacaatgtcgagatgatctgcgagatccacaagcccattgccgtcgagcaaggcca

SEQ ID NO: 1665 - DNA, 19 bp, Artificial Sequence
  Synthetic DNA Sequence
cagtacaggtagacttctg

SEQ ID NO: 1666 - DNA, 888 bp, Microsporum audouinii
  ref <308>: DATABASE ACCESSION NUMBER: ATCC 11347
atgattgcgaaacctacttgctgtggaagaatttggatattctaacatttctctaggcctcaaaccagagagcatctgctccttgcccgccaggtcggtgttcagaagctcgtcgttttcgttaacaaggtcgacgctgttgaggacccagagatgttggaacttgtcgagctagagatgcgtgagctgctcagccactatggtttcgagggtgaggagaccccaatcatttttggctctgctctctgcgcccttgaatctcgacgaccagaattgggtgttgagaagatcgatgagctattgaacgctgtggatacctggattcccaccccagagcgtgccactgataagcctttccttatgtccattgaggaagttttctccatctctggtcgtggtaccgtcgtttccggtcgtgtcgagcgtggtatcctcaagaaggactctgatgtcgaaattgtgggtggatctgatacacccatcaagacgaaggtcaccgacattgaaaccttcaagaagtcttgtgacgaatcccgagctggtgacaactccggtctacttctccgaggtgtcaagcgtgaggacttgagacgtggaatggttgttgctgctcccggatcgaccaaggctcataccgacttcatggtctccctttatgttctgaccgaggctgagggtggccgttccaatggattcacccacaagtaccgcccacagatgttcatccgtactgccggtatgtaaaccctttttctaccattcactttgtttcaccactgacttgtatactttaccgcagacgaagccgcatctttcagctggcctggagaggatcaagacaagaaggccatgcctggtgacaatgtcgagatgatttgcaagaccctc

SEQ ID NO: 1667 - DNA, 793 bp, Piedraia hortai
  ref <308>: DATABASE ACCESSION NUMBER: ATCC 24292
atgccgcagacccgcgagcacttgctgctcgcccgtcaggtcggtgtccagaagatcgttgttttcgtcaacaaggttgatgctatcgacgacccggagatgctggagcttgtcgagatggagatgcgtgaacttctcagcacatacggtttcgagggtgacgagacccctgttattatgggctccgcgctcatggctctcaacaaccagcgccccgagattggtcaacagaagattgatgaactcatggccgctgtcgacgagtggatccctactccccagcgtgacctcgacaagcctttcctgatgtctgttgaggatgtcttctccattgctggccgtggtaccgttgtgtccggccgtgtggagcgcggtaccctcaagcgtgatgaggaagtcgagcttgtcggcaagggtgtcgaccccatcaagaccaaggtcaccgatatcgagactttcaagaagtcctgcgaggaggctcaggctggtgacaactctggtcttctgatccgtggtgtccgccgcgaggatgttcgtcgcggtatggttgtctccaagcccggcaccgtcaagtctcacactcagttcctggcctcgctttacgttctcaccaaggaggagggtggtcgccacactggtttcggcgagcactaccgtccccagctctacctccgtacctcagacgagtctgtcgatctgaccttccccgagggaactgaggatcaccactccaagatcgtcatgcctggtgacaacatcgagatggtcgtcacgatgactcacgccaacgcta

SEQ ID NO: 1668 - DNA, 891 bp, Escherichia coli
  strain K-12 KL1699
aacatgatcaccggtgctgcgcagatggacggcgcgatcctggtagttgctgcgactgacggcccgatgccgcagactcgtgagcacatcctgctgggtcgtcaggtaggcgttccgtacatcatcgtgttcctgaacaaatgcgacatggttgatgacgaagagctgctggaactggttgaaatggaagttcgtgaacttctgtctcagtacgacttcccgggcgacgacactccgatcgttcgtggttctgctctgaaagcgctggaaggcgacgcagagtgggaagcgaaaatcctggaactggctggcttcctggattcttacattccggaaccagagcgtgcgattgacaagccgttcctgctgccgatcgaagacgtattctccatctccggtcgtggtaccgttgttaccggtcgtgtagaacgcggtatcatcaaagttggtgaagaagttgaaatcgttggtatcaaagagactcagaagtctacctgtactggcgttgaaatgttccgcaaactgctggacgaaggccgtgctggtgagaacgtaggtgttctgctgcgtggtatcaaacgtgaagaaatcgaacgtggtcaggtactggctaagccgggcaccatcaagccgcacaccaagttcgaatctgaagtgtacattctgtccaaagatgaaggcggccgtcatactccgttcttcaaaggctaccgtccgcagttctacttccgtactactgacgtgactggtaccatcgaactgccggaaggcgtagagatggtaatgccgggcgacaacatcaaaatggttgttaccctgatccacccgatcgcgatggacgacggtctgcgtttcgcaatccgtgaaggcggccgtaccgttggcgcgggc

SEQ ID NO: 1669 - DNA, 805 bp, Saksenaea vasiformis
  ref <308>: DATABASE ACCESSION NUMBER: ATCC 60625
tcctcgtggtcgccgccaccgacggcccgatgccgcagaccaaggagcacgtgctcctggcccgccaggtcggcgttccgtacatcgtcgtcgccctcaacaaggccgacatggtggacgacgaggagatcctggagctcgtcgagctcgaggtccgtgagctcctctccgagtacgagttcccgggcgacgacgttcccgtcgtcaaggtctccgctctgaaggccctcgagggcgacaaggagtggggcaactcggttctcgagctcatgaacgccgtcgacacggcgatccccgagcccgagcgtgacgtcgacaagccgttcctcatgccgatcgaggacgtcttcacgatcaccggtcgcggtacggtcgtcaccggccgtatcgagcgtggtgtcctgaaggtcaacgagaccgtcgacatcatcggcatcaagaccgagaagaccaccaccacggtcaccggcatcgagatgttccggaagctcctcgacgagggccaggccggtgagaacgtcggtctgctcctccgtggcatcaagcgcgaggacgtcgagcgcggccaggtcatcatcaagccgggctcggtcacgccgcacacggagttcgaggcgcaggcctacatcctgtccaaggacgagggtggccgccacacgccgttcttcaacaactaccgcccgcagttctacttccgtacgacggacgtgaccggcgtggtgaccctccccgagggcaccgagatggtcatgccgggtgacaacaccgagatgaaggtggagctcatccagcccgtcgccatgga

SEQ ID NO: 1670 - DNA, 935 bp, Trichophyton tonsurans
  ref <308>: DATABASE ACCESSION NUMBER: ATCC 56185
gcttctgacggtcaaatgtaattgaatgcccgcccagacagatgaaaggatttgacgtttctaacatcagtctaggcctcagaccagagaacatttgctccttgcccgccaggtcggtgtccagaagctggtcgttttcgttaacaaggtcgatgccgttgaggacccagagatgttggagcttgtcgaacttgaaatgcgtgaactcctcagccactacggtttcgagggtgaggagacccccatcatttttggctctgctctctgtgccctcgagtcccgtcgacctgagcttggtgtcgagaagattgacgagctattgaacgccgtcgacacctggatccccaccccagagcgcgccactgataagcctttcctcatgtccattgaggaagtgttctctatctctggtcgtggtaccgtcgtctccggtcgtgttgagcgtggtatcctcaagaaggattcggacgtcgaaattgttggtggctctaccacccctatcaagaccaaggtcaccgatatcgaaaccttcaagaagtcctgcgatgaatctcgagctggtgacaactctggtctccttctccgaggtatcaagcgtgaggacttgaagcgtggaatggttgttgctgcccccggatccaccaaggctcacaccgacttcatggtctccctctacgtcctgactgaggctgagggtggtcgttccaacggcttcacccacaagtaccgcccccaaatgttcatccgtactgctggtatgtaacccaagtttccgctatttactaagtagatcattgctaacttgtatttccttccgtagacgaagccgcatctttcagctggcctggagaagaccaagacaagaaggctatgcctggtgacaacgtcgagatgatttgcaagaccctccaccccattgctgccgaggctggcca

SEQ ID NO: 1671 - DNA, 772 bp, Enterobacter aerogenes
  ref <308>: DATABASE ACCESSION NUMBER: ATCC 13048
acgatgcccttgaggtacagaatggtaatgagagcctggtgctggaagttcagcagcagctcggcggtggcgtagtccgtgctatcgccatgggttcttccgacggtctgcgtcgtggtctggaagttaaagaccttgagcacccgatcgaagtcccggtaggtaaagcgactctgggccgtatcatgaacgtcctgggtcagccgatcgacatgaaaggcgacatcggcgaagaagaacgttgggctatccaccgcgcggcgccttcctatgaagagctgtccagctctcaggaactgctggaaaccggcatcaaagttatcgacttgatgtgtccgttcgctaagggcggtaaagttggtctgttcggtggtgcgggtgtaggtaaaaccgtaaacatgatggagctgatccgtaacatcgcgatcgagcactccggttactccgtgtttgcgggcgttggtgagcgtactcgtgagggtaacgacttctatcacgaaatgaccgactccaacgttctggataaagtatccctggtttacggccagatgaacgagccgccgggaaaccgtctgcgcgttgcgctgaccggcctgaccatggctgagaaattccgtgacgaaggtcgtgacgttctgctgttcgtcgataacatctatcgttacaccctggccggtactgaagtatctgcactgctgggccgtatgccttcagcggtaggttatcagccgactctggcggaagagatgggcgttctgcaggaacgtatcac

SEQ ID NO: 1672 - DNA, 1401 bp, Bordetella pertussis
  strain Tohama 1
atgagcaacggaaccatcgttcagtgcatcggcgccgtggtggatattcagttcccccgcgataacatgcccaagatctacgaagcgctcaccctggtcgacgagggttcctcgttcgccgagaagggcttgacgctggaagtgcaacaacagctgggcgacggcgtggtgcgtaccatcgcgctgggttccagcgacgggctgcgccgcggcatgcaagtggccggcaccggcgcaccgatctcggtgcccgtgggccacggcaccctgggccgcatcatggacgtgctgggccgtcccatcgacgaagccggtcccatcgcctccgacgagaagcgcgccatccaccagcccgcgccccgtttcgacgagctgtcgccgtcggtcgagctgctggaaaccggcatcaaggttatcgacctggtgtgcccgttcgccaagggcggcaaggtcggcctgttcggcggcgccggcgtgggcaagaccgtcaacatgatggaactgatcaacaacatcgccaagcagcacagcggcttgtcggtgttcgccggcgtgggcgagcgtacccgcgaaggcaacgacttctaccacgaaatggaagagtcgaacgttctggacaaggtggccatggtgttcggccagatgaacgagcccccgggcaaccgcctgcgcgtggcgctgaccggcctgaccatggccgagaagttccgcgacgaaggccgtgacatcctgttcttcgtcgacaacatctaccgctacaccctggccggtaccgaagtgtcggcgctgctgggccgtatgccgtcggcggtgggctaccagcctacgctggccgaggaaatgggcgtgctgcaagagcgcatcacctcgaccaagaccggttcgatcacctcgatccaggccgtgtacgtgcctgccgacgacttgaccgacccgtcgcccgccacgaccttccagcacttggactcgaccgtcgtgctgtcgcgtgacatcgctgcgctgggcatctatcccgccgtggacccgctggattcctccagccgccagctcgacccgcaagtcgtgggcgaagagcactaccaggtggcccgtggcgtgcagcagacgctgcagcgctacaaggaactgcgcgacatcatcgcgattctgggcatggacgaactgtcgccggaagacaagcaggccgtggcccgcgcgcgcaagatccagcgcttcctgtcgcagcccttctacgtggccgaagtgttcaccggctcgccgggcaagtacgtgtcgctggccgaaacgatccgtggcttcaagatgatcgtcgacggcgagtgcgacgcgctgcccgagcaggcgttctacatggtcggcacgatcgacgaggccttcgagaaggccaagaaactccaataa

SEQ ID NO: 1673 - DNA, 797 bp, Arcanobacterium haemolyticum
  ref <308>: DATABASE ACCESSION NUMBER: ATCC 9345
cagctaccgacggtccaatggctcagacccgcgagcacgttcttcttgctcgccaggttggcgttccacagatcatcgttgctctcaacaaggctgacatggttgacgacgaggaaatcctcgaactcgtcgaaatggaagttcgtgagcttctctcttcccaggagtacccaggtgacgacctcccagtcgtcaagatctcggcactcaaggctctcgaaggcgatgccgaatggagcaaggcaatcgaagatctcatggaagctgtcgatacctacttcgacgatccagtgcgtgacctcgataagccattcctcatgccaatcgaagacgtcttcaccatcaccggtcgtggcaccgttgttaccggccgtgcagagcgcggtatgctcaacttgaacgaagaagttgaaatcctcggtatccgtgcaccacagaagacaaccgttaccggtatcgaaatgttccacaagtcgatggatcacgcagatgcaggcgaaaactgtggtcttctcctccgtggcaccaagcgcgaagatgttgaacgtggtcaggttgttgccaagccaggcaccatcaccccacacaccaacttcgaagctcaggtctacgtgctcggtaaggaagaaggtggccgtcacaacccattcttctccaactaccgtccacagttctacttccgtaccacggatgttaccggcgtgatcacccttccagagggcaccgaaatggttatgccaggcgacaacaccgacatgacagttgagctcatccagccaatcgctatggaagagggc

SEQ ID NO: 1674 - DNA, 785 bp, Butyrivibrio fibrisolvens
  ref <308>: DATABASE ACCESSION NUMBER: ATCC 19171
ctgatggtcctatgccacagacccgtgagcacatcctattagcacgtcaggtaggcgtaccatacatcatcgtattcctaaacaagtgcgatatggttgacgacgaggaattattagagttagttgagatggacgtacgtgatctattaaatcagtaccagttcccaggcgacgacactccaatcatccgtggttcagcactaggtgcattaaacggcgaagagaagtggaaagaggcaatctatcagttagcagacactctagattcatacattccagagccaaagcgtgatatcgatgatccattcctattaccaatcgaagatatcttctcaatctcaggtcgtggtactgtagtaaccggccgtgtagagcgtggtattgtacacgtaggtgacgaagttgaaatcgttggtattcgtccaaccaccaagaccactgtaactggcgttgaaatgttccgtaagttactagacgaaggtcgtgcaggtgataacgttggtgttctactacgtggtaccaagcgtgatgaggttgagcgtggtcaggttctagctgctccaggcacaatcactccacacaccaagttcactggtcaggtttacgtactaagcaaggatgaaggtggtcgtcacactccattcttcaagggctaccgtccacagttcttcttccgtacaaccgatattaccggttctatcgatctgaaagagggcgtagagatggtaatgccaggtgataacaccgacatgaccgtaaccctaatccacccagtagctatggct

SEQ ID NO: 1675 - DNA, 835 bp, Campylobacter jejuni subsp. doylei
  ref <308>: DATABASE ACCESSION NUMBER: ATCC 49349
tggggcgatcttggttgtttctgctgcagatggtcctatgccacaaactagagagcacattcttctttctcgtcaagtaggcgttccatatattgttgtttttatgaataaagcagatatggttgatgatgctgagcttttagagttagttgaaatggaaattagagaattattaagctcttatgatttcccaggcgatgatacacctattatttctggttctgctttaaaagctcttgaagaagctaaagctggacaagatggtgaatggtcagcaaaaattatggatcttatggctgcagttgatagttatattccaactccaactcgtgatactgaaaaagacttcttgatgccaattgaagacgttttctcaatttcaggtcgtggtactgttgttacaggtagaattgaaaaaggtgttgtaaaagtaggtgatactatcgaaatcgttggtattaaagacactcaaacaacaactgtaacaggtgttgaaatgttcagaaaagaaatggatcaaggcgaggcaggagataacgtaggtgttcttcttcgtggtactaaaaaagaagaagttattcgcggtatggttcttgctaaaccaaaatcaattactccacacactgacttcgaagctgaagtttatatcttaaataaagatgaaggtggtagacatactccattctttaacaactatagaccacagttttatgtaagaacaactgatgttacaggttcgattaaattagctgatggtgttgaaatggttatgccaggtgaaaatgtgagaattactgtaagcttgatcgctccagtagcacttgaagaaggaact

SEQ ID NO: 1676 - DNA, 812 bp, Campylobacter lari
  ref <308>: DATABASE ACCESSION NUMBER: ATCC 43675
ttctgcagcagacggccctatgccacaaactagagagcatatcttactttctcgtcaagtaggtgtaccatatattgttgttttcatgaacaaagctgatatggttgatgatgcagaattattagaattagttgaaatggaaattagagaattactaagctcttatgatttcccaggagatgatactccaattatttcaggttcagcattacaagctcttgaagaagcaaaagctggtcaagatggtgaatggtctaaaaaaatcttagatcttatggctgcagttgatgattatattccaactccggctcgtgatacagataaagatttcttgatgccaatcgaagatgttttctcaatctcaggtcgtggaactgttgttaccggtagaattgaaaaaggtgttgtaaaagttggtgatactatagaaatcgttggtattagagacactcaaacaaccacagttactggtgttgaaatgtttagaaaagaaatggatcaaggtgaagctggtgataatgttggtgtattacttcgtggaactaaaaaagaagatgttgaacgtggtatggttcttgctaaaccaaaatcaatcactccacatactgattttgaagcagaagtttatatcttaaataaagatgaaggtggtcgtcatactccattctttaataattatagaccgcaattttatgtaagaacaactgatgttacaggtgctattaaacttgcagaaggcgttgagatggttatgccaggcgataatgatagaattactgtaagtcttattgctccagttgcacttgaggaag

SEQ ID NO: 1677 - DNA, 828 bp, Campylobacter sputorum subsp. sputorum
  ref <308>: DATABASE ACCESSION NUMBER: ATCC 35980
gctattcttgtatgttcagctgcagatggtccaatgccacagactagagagcatattctactatcaagacaagttggtgttccatacatagttgttttcttaaataaagaagatatggttgatgatgctgagcttatagagttggttgaagttgaggttagagatttattaaatgaatatgatttccctggagatgatactccaatcgtaataggttctgctcttaaagctttagaagaagcaaaagctggaacagagggtgaatggtctgctaaaattatgaaacttatggatgctgttgatagctatatcccaactccaacaagagatacagataaagatttccttatgccaatcgaagatatcttctcaatttctggtcgtggtacagttgtaacaggtagaattgaaaaaggtgtagtaaaagttggcgagactattgagatagttggtattagacctactcaaacaacaacagttactggtgttgaaatgtttagaaaagagctagatcaaggtgaagctggagataatgttggtatcttgttaagaggtacaaaaaaagaagatgttgaaagaggtatggttttatgtaaaccaaaatcaatcactcctcacaagaaatttgaaggcgaagtttatattcttacaaaagatgaaggtggtagacatactcctttctttagtaactatagaccacaattttatgttagaacaacagatgtaacaggttctatatctcttcctgagggaacagagatggatatgcctggtgataatgtaaaacttacagttgaacttataaacccaattgctcttgagcaagga

SEQ ID NO: 1678 - DNA, 820 bp, Campylobacter upsaliensis
  ref <308>: DATABASE ACCESSION NUMBER: ATCC 49815
cgattttggttgtttctgctgctgatggtcctatgccacaaactagagagcacattttgctttctcgtcaagtgggtgttccttatatcgtagtttttatgaataaggctgatatggttgatgatgcagagcttttagaattggttgaaatggaaattagagaacttttaagctcttatgatttcccgggcgatgacactcctatcatttcaggctctgctcttcaagccttagaagaggctaaggcgggacaagatggcgagtggtcagctaagattttagagcttatgaaggcagttgatgagtatatcccaactcctgttcgcgatactgaaaaagatttcttgatgcctattgaagatgttttttcaatttctggtcgtggaactgttgtaacaggtagaattgaaaaaggtgtggttaaagtcggcgatactattgagatagtaggtatcaaagatactcaaactacaacagttacaggcgttgagatgtttagaaaagaaatggatcaaggtgaggctggcgataatgtcggtgtgcttttaagaggaacaaaaaaagaagatgttcttcgtggtatggttcttgcaaagcctaaatctatcactcctcatactgattttgaagcagaagtttatattctaaataaagatgagggcggtcgccatactcctttctttaacaattatcgtccgcagttttatgtaagaacgactgatgtaactggttctattaaattagctgatggtgttgagatggttatgccgggtgaaaatgtaagaattacagttagccttatcgctccagttgcacttga

SEQ ID NO: 1679 - DNA, 783 bp, Globicatella sanguis
  ref <308>: DATABASE ACCESSION NUMBER: ATCC 51173
ctgcagctgatggtccaatgcctcaaacacgtgaacatatcttattatcacgtcaagtaggtgttccttacatggttgtcttcttaaacaaagttgacatggttgacgatgaagaattattagaattagttgaaatggaagttcgtgatttattatctgaatacgaattccctggagacgacgttccagtaatcgctggttcagctttaaaagctttagaaggcgaagaacaatatgaagcaaaagtattagaattaatggaagctgtagatacatacattccagaaccagttcgtgatactgaaaaaccattcatgatgccagttgaagatgtgttctcaatcacaggtcgtggtacagttgctactggacgtgttgaacgtggacaagttaaagttggtgacgaagttgaaatcgttggtattgctgaagaaattagcaaaacaactgtaactggtgttgaaatgttccgtaaattattagattacgctgaagctggagataacattggtgcgttattacgtggtgttacacgtgaacaaatccaacgtggtcaagtattagcaaaaccaggaacaattacacctcatactaaattcgaggcggaagtttacgtattatcaaaagaagaaggtggacgtcatactccattcttcgctaactaccgtcctcaattctacttccgtacaactgacgttacaggtgttgtagaattaccagaaggtacagaaatggtaatgcctggagataacgtatcaatgacagttgaattaattcacccaa

SEQ ID NO: 1680 - DNA, 823 bp, Lactobacillus acidophilus
  ref <308>: DATABASE ACCESSION NUMBER: ATCC 4356
gctatcttagttgttgctgcaactgatggtcctatgccacaaactcgtgaacacattttgcttgctcgtcaagttggtgttaactacatcgtagtattcttgaacaagtgcgatttagttgacgacccagaattgatcgacttggttgaaatggaagttcgtgacttgttgactgaatacgattaccctggtgatgatattccagttgttcgtggttcagcattaaaggctttacaaggtgacaaggaagctcaagaccaaatcatgaagttgatggacattgttgatgaatacatcccaactccagaacgtcaaactgacaagccattcttgatgccagttgaagacgtattcactatcactggtcgtggtactgttgcttcaggtcgtatcgaccgtggtactgttaaggtcggtgacgaagttgaaatcgttggtttggtagataaagttcttaagtcagttgttactggtttggaaatgttccacaagactttggacttaggtgaagccggcgataacgttggtgtattgcttcgtggtgttgaccgtgatcaagttgttcgtggtcaagtattggctgcacccggctcaatccaaactcataagaagtttaaggcacaagtttatgttttgaagaaggacgaaggtggtcgtcacactccattcttctcagactaccgtccacaattctacttccacaccactgatattactggtgaaattgaattgccagaaggtactgaaatggttatgcctggtgataacactgaattcactgttactttgatcaagccagctgccatcgaaaagggtactaagt

SEQ ID NO: 1681 - DNA, 793 bp, Leuconostoc mesenteroides subsp. dextranicum
  ref <308>: DATABASE ACCESSION NUMBER: ATCC 19255
gctgcaactgatggtcctatgccacaaacacgtgaacacatcttgttggcacgtcaagttggtgttgactacttggttgtcttcttgaacaagactgatttggttgatgatgaagaattagttgaattggttgaaatggaagttcgtgaattgttgtcagaatatgacttcccaggtgacgatattcctgtacttaagggttcagctttgaaggctttggaaggtgatcctgaacaagttaaggttatcgaagaattgatggatactgttgattcatacattccagaaccagcacgtgaaacagacaagccattcttgatgcctgtcgaagacgtcttcacaatcactggtcgtggtacagttgcttctggtcgtgttgaccgtggtgtattgactacaggaactgaaattgaaatcgttggtttgaaggacgaagttcaaaagactactgttacaggtatcgaaatgttccgtaagactttggaagaagctcaagcgggtgataacattggtgcattgttgcgtggtgttgatcgtagcaacattgaacgtggtcaagttttggcaaagccaggttcaattaagacacacaagaagttcaaggctgaagtttatgtcttgacaaaggaagaaggtggtcgtcatacaccattcttcactaactaccgtccacaattctacttccacacaactgatgttacaggtgttgttgaattgccagccggtgttgaaatggttatgcctggtgaccaagtgacattcgaaatcgaattgatctcaccagttgccatcg

SEQ ID NO: 1682 - DNA, 796 bp, Prevotella buccalis; identical to SEQ ID NO: 1573
  ref <308>: DATABASE ACCESSION NUMBER: ATCC 35310

SEQ ID NO: 1683 - DNA, 800 bp, Ruminococcus bromii
  ref <308>: DATABASE ACCESSION NUMBER: ATCC 27255
ggttgctgctactgacggcccgatgcctcagactcgtgagcacgttctgctcgctcgtcaggtgggtgtgcccgccatcgtcgtcgccctcaacaagtgcgacatggttgacgatgaggagctcattgagcttgtcgagatggaggtccgcgagctgctgacctcgcaggagttcgacggcgacaactgccctgtcgttcgcatctccgccttccaggccctccagggtgacgagaagtggacccagtcgatcctcgacctcatggacgccgtggacgagtacatcccgcagcctgagcgcgatctcgacaagcccttccttatgccgatcgaggacgtcttcaccatcaccggccgtggcaccgttgtcaccggtcgtgtcgagcgtggtgtcgtcaagactggcgaagaggtcgagatcgtcggtatccacgagaagacccagaagaccaccgttaccggtgtcgagatgttccgtaagatcctcgacgagggccgcgctggtgagaacgtcggcgttctgctccgtggcaccaagaaggaggacgtcgttcgcggcatggtcctctccaagcctggttccaccaccccccacaccgacttcgagggccaggtctacgtcctcaagaaggatgagggtggccgccacaagccgttcttctcccattacagcccccagttctacttccgtaccacggacgtgactggcactgttgagctccccgagggcaccgagatggtcatgcctggcgacaacaccgacatgactgtgcacctgattcacccggttgccatggagg

SEQ ID NO: 1684 - DNA, 545 bp, Paracoccidioides brasiliensis
  ref <308>: DATABASE ACCESSION NUMBER: ATCC 32075
tgtctttattcaggaactgattgtatgtttcttctcgtttatatataacataccttctatatttcatgtgtttctaacgaactcatagaacaacattgccaaggctcacggtggttactccgtgttcaccggtgtcggtgagcgtacccgtgaaggaaacgatctgtaccacgaaatgcaggaaacccgcgtcatccagctggacggcgagtccaaagtcgccctcgtcttcggccagatgaacgagccccccggagcccgtgcccgtgttgccctgaccggtctgaccatcgctgaatacttccgtgacgaagaaggccaagatggtacgttcccccattccatatatgtttcttgtgcgctttgccaactaaacaccacctagtgctcctcttcatcgacaatatcttccgcttcacccaagccggttccgaagtgtccgccctgctaggccgcatcccctccgccgtcggctatcaacccaccctcgccgtcgacatgggtggtatgcaggagcgcatcacaactacaacaaaaggctccat

SEQ ID NO: 1685 - DNA, 1020 bp, Candida norvegica
  ref <308>: DATABASE ACCESSION NUMBER: ATCC 36586
gatatcgctttatggaaattcgaaactccaaaattccacgttacygttatcgatgctccaggtcacagagatttcatcaagaatatgattacyggtacctcccaagctgattgtgctattttaatcattgctggtggtgttggtgaattcgaagctggtatctccaaagatggtcaaaccagagaacacgctttgttagctttcaccttaggtgtyaaacaattgattgttgccgttaacaaaatggactctgtcaaatgggatcaatcccgtttcgaagaaatcgtcaaggaagcttccggtttcatcaagaaagttggttacaacccaaagactgttccattcgttccaatctctggttggaatggtgacaacatgattgaagtytcwgctaacgcyccatggtacaaaggttgggaaaaggaaaccaaagcyggtgtcgttaaaggtaaaactttattagaagccattgatgctattgaaccaccttcaagaccaactgaaaaaccattgagattgccattgcaagatgtctacaagattggtggtatcggaaccgtaccagtcggtaragttgaaaccggtgtcattaaaccaggtatgattgttactttcgccccagccggtgttactactgaagtcaaatctgttgaaatgcatcacgaacaattagaagctggttacccaggtgacaatgttggtttcaacgtcaagaatgtttcagttaaagaaatcagaagaggtaahgttgctggtgactccaagaacgatccaccaaaaggtgctgaatctttcaacgctcaagttattgtcttgaaccatccaggtcaaatctytgctggttactytccagttttggattgtcacactgcccacattgcttgtaaattcgatgaaatcttggaaaagattgacagaagatccggtaagaaattggaagaaaatccaaaattcatcaaatctggtgacgctgctawtgtcaaatttgttccatwtaaaccattrtgtgttgaagctttc

SEQ ID NO: 1686 - DNA, 929 bp, Aspergillus nidulans
  strain WSA-176
tgctgcttccgatggtcaaatgtacgattgatattccttccagccagtcaggataacagctgataccagttgcaaataggccccagactcgtgagcacttgttgcttgcccgtcaggttggtgtccagaagatcgttgtcttcgtcaacaaggttgacgctgtcgatgaccctgagatgttggagcttgttgagctcgagatgcgtgagctcctcaacacttacggtttcgagggagaggagacccctatcatcttcggttccgccctgtgcgctctcgaaggccgccgcgaggacattggtactcagcgtattgactccctcctcgaggccgttgacacttggatccctaccccccagcgtgacttggacaagcccttcctgatgtccattgaggaagttttctccattggtggtcgtggtaccgtcgcctctggtcgtgtcgagcgtggtctcctcaagaaggataccgaagttgaaattcacggtgctgatggtattctgaagaccaaggtcaccgacattgagaccttcaagaagagctgcgatgagtctcgtgctggtgacaactccggtcttctcctccgtggtatccgtcgtgaggatgttcgtcgtggtatggtcatcgctgcccctggctccatcaaggcctccaagaagttcatggtctccatgtacgtcttgactgaggctgaaggtggccgcaagaacggcttcggtgccaactaccgcccccaggctttcatccgcactgctggtaagtttcgaactatttgattcattgatcacgtccctaactgttactttagacgaggcttgcgaccttcatttccctgatgaggccgacaaggaccgccacgtcatgcccggtgacaacgtcgaaatggtcctcaacctcaacaaccccgttgctgctgaggctggacagcg

SEQ ID NO: 1687 - DNA, 951 bp, Aspergillus terreus
  strain WSA-174
tgccgcttccgatggtcagatgtacgctcaagccccagtttccatataaacataaacgatctatcatcagcacaacgctgacttcttcgcttccaggccccagacccgtgagcacttgctgttggcccgtcaggtcggtgtccagaagatcgtggtcttcgtcaacaaggtcgatgccgttgatgacccggagatgttggagctcgttgagctggaaatgcgcgagctcctgaccagctacggattcgagggtgaagagacccccatcatcttcggttctgctctctgcgctcttgagggccgccgtcctgagattggtactgagaagattgacgagctgatgcacgccgtcgacacctggatccccaccccccagcgtgacctcgacaagcccttcctgatgtccgtcgaggaagtcttctccattgctggtcgtggtaccgtcgcttccggccgtgtcgagcgtggtattctgaagaaggatagcgaagtcgagatcatcggtggtgctttcgacgccacgaagaccaaggtcactgacatcgagaccttcaagaagtcttgcgacgagtctcgcgctggtgacaactctggtctcctcctccgtggtatccgtcgtgaggatgttcggcgtggtatggtcattgctgctcctggcagcaccaaggcccacgacaagttccttgtctctatgtacgtcctcactgaggctgagggtggccgtcgtaccggattcggtaccaactaccgcccccaggtcttcatccgtactgccggtaagtgttcctggaagaggctttgagcctatataggatctcggataatttactaatccaccatatagatgaggccgctgacctcagcttccccgacaacgatgactcccgccgtgtcatgcccggtgacaacgttgagatggtcctgaagacccaccgccccgtggctgctgag

SEQ ID NO: 1688 - DNA, 823 bp, Candida norvegica
  ref <308>: DATABASE ACCESSION NUMBER: ATCC 36586
cgttgccgctaccgatggtcaaatgcctcaaactagagaacatttgctattggctagacaggttggtgttcaacacattgtcgtgtttgttaacaaggttgacactattgatgatccagaaatgttggaattggttgaaatggaaatgagagagttgattgccacttatggtttcgatggtgataacaccccagttatcatgggttctgctctatgtgctttggaaggtcgtgaacctgaaatcggtgctcaatcaatcgacagattgttggaagccgttgatgaatacattccaactccaactagagatttggaaaaaccattcttgatgggtgttgaagatgtcttctccatttctggtagaggtaccgtctgtaccggtcgtgttgaaagaggtaacttgaagaaaggtgatgaaatcgaaattgtcggctacaacaagactccaatcaaaaccaccgtcaccggtattgagatgttcaaaaaggaattagaccaagctatggctggtgataactgtggtatcttattacgtggtgttaagagagatgatatcaagagaggtatggttatctctaaagtcaacaccgtttccgcacacaccaaattcttggcctctttatacgtcttgactaaagaagaaggtggtcgtcattcaggttttgctgaaaactacagacctcaattgttcatcagaaccggtgatgtcactgttactttaaccttcccagaagatgctgatcactctcagcaagtcttaccaggtgacaacgttgaaatggaatgtaccttggttcatccaactgctcttgaaaccggtcaa

SEQ ID NO: 1689 - DNA, 803 bp, Candida parapsilosis
  ref <308>: DATABASE ACCESSION NUMBER: ATCC 201076
gctgctactgacggtcaaatgcctcaaactagggaacatatgttgttggcgagacaagttggtatccaaaacttggttgtttttgttaacaaagttgataccattgatgacccagaaatgttggaattggttgaaatggaaatgagggaattattgagctcttatgggtttgatggtgaaaacactccagttatcatgggatcagccttgtgtgctttagaaggtaaacaaccagaaatcggtgttcaagccattcaaaaattattggatgctgttgatgaatatattccaactccagaaagagatgctgaccaaccatttttgatgccagtggaagatgtgttttctatttcaggtagaggaaccgttgtcaccggaagagttgaaagaggtatgttgaagaaaggtgaagaagtakaagtcattggtgaaaactcatttaaggctacttccacgggtattgagatgttcaaaaaggaattggatgccgctatggccggtgacaactgtggtattttgttgagaggtgtcaagagagacgaagtcaagaggggtatggttttggccaaaccaggtaccaccaccccacaccaaaagtttttggcttccatttatatcttgactgctgaagaaggtggacgtagtacccctttcagtgaaggatacaaaccacaatgtttctttagaactagtgatgttaccacgacatttactttcccagaaggtgaaggtgttgaccactcacaaatggttatgccaggagrcaatgttgaaatggtgggaactttaatcaagaaagctcc

SEQ ID NO: 1690 - DNA, 23 bp, Artificial Sequence
  Synthetic DNA Sequence
caggtcctgttgcgactgaagaa

SEQ ID NO: 1691 - DNA, 25 bp, Artificial Sequence
  Synthetic DNA Sequence
cacagataaacctgagtgtgctttc

SEQ ID NO: 1692 - DNA, 24 bp, Artificial Sequence
  Synthetic DNA Sequence
ggtgagaactgtggtatcttactt

SEQ ID NO: 1693 - DNA, 24 bp, Artificial Sequence
  Synthetic DNA Sequence
catttcaacgccttctttcaactg

SEQ ID NO: 1694 - DNA, 20 bp, Artificial Sequence
  Synthetic DNA Sequence
aaggcaaggatgacaacggc

SEQ ID NO: 1695 - DNA, 21 bp, Artificial Sequence
  Synthetic DNA Sequence
acgatttccacttcttcctgg

SEQ ID NO: 1696 - DNA, 20 bp, Artificial Sequence
  Synthetic DNA Sequence
atgttcctgtagttgctgga

SEQ ID NO: 1697 - DNA, 22 bp, Artificial Sequence
  Synthetic DNA Sequence
tttcttcagcaataccaacaac

SEQ ID NO: 1698 - DNA, 23 bp, Artificial Sequence
  Synthetic DNA Sequence
ggaatcaacagatggtttacaaa

SEQ ID NO: 1699 - DNA, 20 bp, Artificial Sequence
  Synthetic DNA Sequence
gcatcttctgggaaaggtgt

SEQ ID NO: 1700 - DNA, 20 bp, Artificial Sequence
  Synthetic DNA Sequence
aagatgcggaaagaagcgaa

SEQ ID NO: 1701 - DNA, 23 bp, Artificial Sequence
  Synthetic DNA Sequence
attatggatcagttcttggatca

SEQ ID NO: 1702 - DNA, 213 bp, Streptococcus gordonii
  strain Challis V288
ttcatagacgctgagcacgctttggatccatcttacgcggctgctctaggtgtaaatattgatgagctgttgctatctcaaccagattctggtgagcaaggtttagaaattgcaggaaaattgattgactctggggcagttgatttagttgtcatcgactctgttgcagctcttgtaccacgtgcggaaatcgatggagatatcggtgatagc

SEQ ID NO: 1703 - DNA, 692 bp, Streptococcus mutans
  strain GS-5
gggccggaatcttctggtaagacaactgtcgctcttcatgctgctgctcaggcgcaaaaagatggcggtattgccgctttcattgatgcagaacatgcccttgatccagcctatgctgctgctcttggcgttaatattgatgagcttttgctttcacaaccagattcaggagaacagggtcttgaaattgcagggaaattgattgattctggcgctgttgatttagttgttgttgactcagtggcagctttagtaccacgtgcggagattgacggagatattggtaatagtcatgttggcttacaagcacgcatgatgagtcaagcgatgcgtaaattatcagcttcaatcaataaaacaaaaaccattgctatttttattaatcaattgcgggaaaaagttggtattatgtttggtaatccagaaacaacccctggcgggcgtgccttgaagttttattcttctgtgcgtcttgatgtccgcggcaatactcaaattaaaggaaccggggaacaaaaagacagcaatattggtaaagagaccaaaattaaagttgttaaaaataaagttgctccaccatttaaggaagcttttgtagaaattatatatggtgaaggcatttctcgtacaggtgaattagttaagattgccagtgatttgggaattatccaaaaagctggagcttggtactc

SEQ ID NO: 1704 - DNA, 1204 bp, Streptococcus pneumoniae
atggcgaaaaaaccaaaaaaattagaagaaatttcaaaaaaatttggggcagaacgtgaaaaggccttgaatgacgctcttaaattgattgagaaagactttggtaaaggatcaatcatgcgtttgggtgaacgtgcggagcaaaaggtgcaagtgatgagctcaggttctttagctcttgacattgcccttggctcaggtggttatcctaagggacgtatcatcgaaatctatggcccagagtcatctggtaagacaacggttgcccttcatgcagttgcacaagcgcaaaaagaaggtgggattgctgcctttatcgatgcggaacatgcccttgatccagcttatgctgcggcccttggtgtcaatattgacgaattgctcttgtctcaaccagactcaggagagcaaggtcttgagattgcgggaaaattgattgactcaggtgcagttgatcttgtcgtagtcgactcagttgctgcccttgttcctcgtgcggaaattgatggagatatcggagatagccatgttggtttgcaggctcgtatgatgagccaggccatgcgtaaacttggcgcctctatcaataaaaccaaaacaattgccatttttatcaaccaattgcgtgaaaaagttggagtgatgtttggaaatccagaaacaacaccgggcggacgtgctttgaaattctatgcttcagtccgcttggatgttcgtggtaatacacaaattaagggaactggtgatcaaaaagaaaccaatgtcggtaaagaaactaagattaaggttgtaaaaaataaggtagctccaccgtttaaggaagccgtagttgaaattatgtacggagaaggaatttctaagactggtgagcttttgaagattgcaagcgatttggatattatcaaaaaagcaggggcttggtattcttacaaagatgaaaaaattgggcaaggttctgagaatgctaagaaatacttggcagagcacccagaaatctttgatgaaattgataagcaagtccgttctaaatttggcttgattgatggagaagaagtttcagaacaagatactgaaaacaaaaaagatgagccaaagaaagaagaagcagtgaatgaagaagttccgcttgacttaggcgatgaacttgaaatcgaaattgaagaataagctgttaaagcagtggagaaatccgctactttttcga

SEQ ID NO: 1705 - DNA, 981 bp, Streptococcus pyogenes
  strain NZ131
atgcgttcaggaagtctagctcttgatattgcttggatagctggtggttatcctaaaggacgtatcatcgaaatctatggtccagagtcttccggtaaaacgactgtggctttacatgctgtagcacaagctcaaaaagaaggtggaatcgcagcctttatcgatgccgagcatgcgcttgatccagcttatgctgctgcgcttggggttaatattgatgaacttctcttgtctcaaccagattctggagaacaaggacttgaaattgcaggtaaattgattgattctggtgcggttgacctggttgttgtcgattcagtagcagctttagtgccacgtgctgaaattgatggtgatattggcgatagccatgtcggattgcaagcacgtatgatgagtcaggccatgcgtaaattatcagcttctattaataaaacaaaaactatcgcaatctttatcaaccaattgcgtgaaaaagttggtgtgatgtttggaaatcctgaaacaacaccaggtggtcgagctttgaaattctatgcttctgttcggctggatgtgcgtggaaacaaccaaattaaaggaactggtgaccaaaagatagccagcattggtaaggagaccaaaatcaaggttgttaaaaacaaggtcgctccgccatttaaggtagcagaagttgaaatcatgtatggggaaggtatttctcgtacaggggagcttgtgaaaattgcttctgatttggacattatccaaaaagcaggtgcttggttctcttataatggtgagaagattggccaaggttctgaaaatgctaagcgttatttggccgatcatccacaattgtttgatgaaatcgaccgtaaagtacgtgttaaatttggtttgcttgaagaaagcgaagaagaatctgctatggcagtagcatcagaagaaaccgatgatcttgctttagatttagataatggtattgaaattgaagattaa

SEQ ID NO: 1706 - DNA, 312 bp, Streptococcus salivarus subsp. thermophilus
gcgtatgcacgagctctaggtgttaatatcgatgagcttcttttgtcgcagcctgattctggtgagcaaggtctcgaaattgcaggtaagctgattgactctggtgcagtggatttagttgttgttgactcagttgcggccttcgtaccacgtgcagaaattgatggagatagtggtgacagtcatgtaggacttcaagcgcgtatgatgagtcaagccatgcgtaaactttctgcatctattaataaaacaaaaacgattgctatctttattaaccagttgcgtgaaaaagttggtatcatgtttggtaac

SEQ ID NO: 1707 - DNA, 831 bp, Escherichia coli
atgaaaaacacaatacatatcaacttcgctatttttttaataattgcaaatattatctacagcagcgccagtgcatcaacagatatctctactgttgcatctccattatttgaaggaactgaaggttgttttttactttacgatgcatccacaaacgctgaaattgctcaattcaataaagcaaagtgtgcaacgcaaatggcaccagattcaactttcaagatcgcattatcacttatggcatttgatgcggaaataatagatcagaaaaccatattcaaatgggataaaacccccaaaggaatggagatctggaacagcaatcatacaccaaagacgtggatgcaattttctgttgtttgggtttcgcaagaaataacccaaaaaattagattaaataaaatcaagaattatctcaaagattttgattatggaaatcaagacttctctggagataaagaaagaaacaacggattaacagaagcatggctcgaaagtagcttaaaaatttcaccagaagaacaaattcaattcctgcgtaaaattattaatcacaatctcccagttaaaaactcagccatagaaaacaccatagagaacatgtatctacaagatctggataatagtacaaaactgtatgggaaaactggtgcaggattcacagcaaatagaaccttacaaaacggatggtttgaagggtttattataagcaaatcaggacataaatatgtttttgtgtccgcacttacaggaaacttggggtcgaatttaacatcaagcataaaagccaagaaaaatgcgatcaccattctaaacacactaaatttataa

SEQ ID NO: 1708 - DNA, 846 bp, Enterococcus faecalis
  strain HH22
ttgaaaaagttaatatttttaattgtaattgctttagttttaagtgcatgtaattcaaacagttcacatgccaaagagttaaatgatttagaaaaaaaatataatgctcatattggtgtttatgctttagatactaaaagtggtaaggaagtaaaatttaattcagataagagatttgcctatgcttcaacttcaaaagcgataaatagtgctattttgttagaacaagtaccttataataagttaaataaaaaagtacatattaacaaagatgatatagttgcttattctcctattttagaaaaatatgtaggaaaagatatcactttaaaagcacttattgaggcttcaatgacatatagtgataatacagcaaacaataaaattataaaagaaatcggtggaatcaaaaaagttaaacaacgtctaaaagaactaggagataaagtaacaaatccagttagatatgagatagaattaaattactattcaccaaagagcaaaaaagatacttcaacacctgctgctttcggtaagactttaaataaacttatcgcaaatggaaaattaagcaaagaaaacaaaaaattcttacttgatttaatgttaaataataaaagcggagatactttaattaaagacggtgttccaaaagactataaggttgctgataaaagtggtcaagcaataacatatgcttctagaaatgatgttgcttttgtttatcctaagggccaatctgaacctattgttttagtcatttttacgaataaagacaataaaagtgataagccaaatgataagttgataagtgaaaccgccaagagtgtaatgaaggaattttaa

SEQ ID NO: 1709 - DNA, 555 bp, Pseudomonas aeruginosa
atgtccgcgagcaccccccccataactcttcgcctcatgaccgagcgcgacctgccgatgctccatgactggctcaaccggccgcacatcgttgagtggtggggtggcgacgaagagcgaccgactcttgatgaagtgctggaacactacctgcccagagcgatggcggaagagtccgtaacaccgtacatcgcaatgctgggcgaggaaccgatcggctatgctcagtcgtacgtcgcgctcggaagcggtgatggctggtgggaagatgaaactgatccaggagtgcgaggaatagaccagtctctggctgacccgacacagttgaacaaaggcctaggaacaaggcttgtccgcgctctcgttgaactactgttctcggaccccaccgtgacgaagattcagaccgacccgactccgaacaaccatcgagccatacgctgctatgagaaggcaggattcgtgcgggagaagatcatcaccacgcctgacgggccggcggtttacatggttcaaacacgacaagccttcgagagaaagcgcggtgttgcctaa

SEQ ID NO: 1710 - DNA, 732 bp, Staphylococcus aureus
atgaaccagaaaaaccctaaagacacgcaaaattttattacttctaaaaagcatgtaaaagaaatattgaatcacacgaatatcagtaaacaagacaacgtaatagaaatcggatcaggaaaaggacattttaccaaagagctagtcaaaatgagtcgatcagttactgctatagaaattgatggaggcttatgtcaagtgactaaagaagcggtaaacccctctgagaatataaaagtgattcaaacggatattctaaaattttccttcccaaaacatataaactataagatatatggtaatattccttataacatcagtacggatattgtcaaaagaattacctttgaaagtcaggctaaatatagctatcttatcgttgagaagggatttgcgaaaagattgcaaaatctgcaacgagctttgggtttactattaatggtggagatggatataaaaatgctcaaaaaagtaccaccactatattttcatcctaagccaagtgtagactctgtattgattgttcttgaacgacatcaaccattgatttcaaagaaggactacaaaaagtatcgatcttttgtttataagtgggtaaaccgtgaatatcgtgttcttttcactaaaaaccaattccgacaggctttgaagcatgcaaatgtcactaatattaataaactatcgaaggaacaatttctttctattttcaatagttacaaattgtttcactaa

SEQ ID NO: 1711 - DNA, 738 bp, Escherichia coli
  strain BM2570
atgaacaaaaatataaaatattctcaaaactttttaacgagtgaaaaagtactcaaccaaataataaaacaattgaatttaaaagaaaccgataccgtttacgaaattggaacaggtaaagggcatttaacgacgaaactggctaaaataagtaaacaggtaacgtctattgaattagacagtcatctattcaacttatcgtcagaaaaattaaaatcgaatactcgtgtcactttaattcaccaagatattctacagtttcaattccctaacaaacagaggtataaaattgttgggaatattccttaccatttaagcacacaaattattaaaaaagtggtttttgaaagccatgcgtctgacatctatctgattgttgaagaaggattctacaagcgtaccttggatattcaccgaacactagggttgctcttgcacactcaagtctcgattcagcaattgcttaagctgccagcggaatgctttcatcctaaaccaagagtaaacagtgtcttaataaaacttacccgccataccacagatgttccagataaatattggaagctatatacgtactttgtttcaaaatgggtcaatcgagaatatcgtcaactgtttactaaaaatcagtttcatcaagcaatgaaacacgccaaagtaaacaatttaagtaccgttacttatgagcaagtattgtctatttttaatagttatctattatttaacgggaggaaataa

SEQ ID NO: 1712 - DNA, 735 bp, Staphylococcus aureus
  strain RN451
atgaacgagaaaaatataaaacacagtcaaaactttattacttcaaaacataatatagataaaataatgacaaatataagattaaatgaacatgataatatctttgaaatcggctcaggaaaagggcattttacccttgaattagtacagaggtgtaatttcgtaactgccattgaaatagaccataaattatgcaaaactacagaaaataaacttgttgatcacgataatttccaagttttaaacaaggatatattgcagtttaaatttcctaaaaaccaatcctataaaatatttggtaatataccttataacataagtacggatataatacgcaaaattgtttttgatagtatagctgatgagatttatttaatcgtggaatacgggtttgctaaaagattattaaatacaaaacgctcattggcattatttttaatggcagaagttgatatttctatattaagtatggttccaagagaatattttcatcctaaacctagagtgaatagctcacttatcagattaaatagaaaaaaatcaagaatatcacacaaagataaacagaagtataattatttcgttatgaaatgggttaacaaagaatacaagaaaatatttacaaaaaatcaatttaacaattccttaaaacatgcaggaattgacgatttaaacaatattagctttgaacaattcttatctcttttcaatagctataaattatttaataagtaa

SEQ ID NO: 1713 - DNA, 1029 bp, Enterococcus faecalis
  strain V583
atgaataaaataaaagtcgcaattatcttcggcggttgctcggaggaacatgatgtgtcggtaaaatccgcaatagaaattgctgcgaacattaatactgaaaaattcgatccgcactacatcggaattacaaaaaacggcgtatggaagctatgcaagaagccatgtacggaatgggaagccgatagtctccccgccatattctccccggataggaaaacgcatggtctgcttgtcatgaaagaaagagaatacgaaactcggcgtattgacgtggctttcccggttttgcatggcaaatgcggggaggatggtgcgatacagggtctgtttgaattgtctggtatcccctatgtaggctgcgatattcaaagctccgcagcttgcatggacaaatcactggcctacattcttacaaaaaatgcgggcatcgccgtccccgaatttcaaatgattgaaaaaggtgacaaaccggaggcgaggacgcttacctaccctgtctttgtgaagccggcacggtcaggttcgtcctttggcgtaaccaaagtaaacagtacggaagaactaaacgctgcgatagaagcagcaggacaatatgatggaaaaatcttaattgagcaagcgatttcgggctgtgaggtcggctgcgcggtcatgggaaacgaggatgatttgattgtcggcgaagtggatcaaatccggttgagccacggtatcttccgcatccatcaggaaaacgagccggaaaaaggctcagagaatgcgatgattatcgttccagcagacattccggtcgaggaacgaaatcgggtgcaagaaacggcaaagaaagtatatcgggtgcttggatgcagagggcttgctcgtgttgatctttttttgcaggaggatggcggcatcgttctaaacgaggtcaataccctgcccggttttacatcgtacagccgctatccacgcatggcggctgccgcaggaatcacgcttcccgcactaattgacagcctgattacattggcgatagagaggtga

SEQ ID NO: 1714 - DNA, 818 bp, Campylobacter jejuni subsp. jejuni
  ref <308>: DATABASE ACCESSION NUMBER: ATCC 33292
gcacaggttcagttgggcttgatcttgctttaggtataggcggtgttccaaaaggaagaattatagaaatttatggrcctgaaagttcaggtaaaaccactctaactctacacattatcgcagaatgccaaaaagcaggtggrgtttgtgcttttatcgatgcagaacatgcrcttgatgtraaatatgctaaaaatttgggtgtaaatacagatgatttgtatgtttctcagcctgattttggagarcaagccttagaaattgtagaaactatagcaagaagtggcgcagtagatcttatcgtagtagatagcgttgcagcgcttaccccaaaagcagaaattgaaggcgatatgggtgatcaacatgtaggacttcaagcaagacttatgtctcaagctctaagaaaacttacaggtatagttcataaaatgaataccacagtaattttyatcaaccaaattcgtatgaaaatcggtgctatgggttatggtactcctgaaaccacaacaggtggaaatgcattaaaattttatgcttctgtgcgtttagatgttagaaaagtagcaaccttaaaacaaaacgaagaacctataggaaaccgcgttaaagtaaaagtagttaaaaataaagttgctcctccattcagacaagctgaatttgatgtgatgtttggagagggtttaagccgtgaaggtgaattgatcgattatggtgtaaaacttgatatcgtagataaaagtggtgcgtggttttcttataaagataaaaaacttggacaaggtagagaaaattcaaaagctttcttaaaagaaaac

SEQ ID NO: 1715 - DNA, 809 bp, Abiotrophia adiacens
  ref <308>: DATABASE ACCESSION NUMBER: ATCC 49175
tggtgctatcttagtagtatctgcagctgatggtccaatgcctcaaacacgtgaacacatcttattatcacgtcaagtaggtgttccttacatcgttgtattcttaaacaaagttgacatggttgacgatgaagaattattagaattagtagaaatggaagttcgtgacttattatcagaatacgatttcccaggcgatgacactccagttgttgcaggttctgctttacgcgctttagaaggcgacgcttcatacraagaaaaaatcttagaattaatggctgctgttgacgaatacattccaactccagaacgygacgttgacaaaccattcatgatgccagttgaagacgtgttctcaatcacaggtcgtggtactgttgctacaggtcgtgttgaacgtggacaagttcgtgttggtgacgaagttgaaatcgttggtatttcagaagaaacttcaaaaacaactgtaactggtgttgaaatgttccgtaaattgttagactacgctgaagcaggggataacattggtacattattacgtggtgttacacgtgacaacatcgaacgtggacaagttcttgctaaaccaggaacaatcactccacatactaaattcaaagctgaagtttacgtattaactaaagaagaaggtggacgtcatactccattcttctctaactaccgtcctcaattctacttccgtacaacagacatcactggtgtttgtgtgttaccagaaggcgttgaaatggtaatgcctggtgataacgtaactatggaagttgaattaattcacccagtagcga

SEQ ID NO: 1716 - DNA, 817 bp, Abiotrophia defectiva
  ref <308>: DATABASE ACCESSION NUMBER: ATCC 49176
cggcgcgatcctcgttgtatctgctgctgacggcccaatgccacaaactcgtgaacacatcctcttgtctcgtcaagttggtgttccttacatcgtagtattcttgaacaaagttgacatggttgacgacgaagaattgctcgaattagttgaaatggaagttcgtgacctcttgtctgaatacgacttcccaggcgacgacactccagttatcgctggttcagctttgaaagctttagaaggcgacgctaactacgaagctaaagttttagaattgatggaacaagttgatgcttacattccagaaccagaacgtgacactgacaagccattcatgatgccagtcgaagacgtattctctatcactggtcgtggtactgttgcaactggtcgtgttgaacgtggtcaagttcgcgttggtgacgaagttgaaatcgttggtatcgaagaagaaacttctaagactaccgttaccggtgttgaaatgttccgtaagttattggattacgctgaagctggggacaacgttggtaccttgttacgtggtgtaactcgtgaccaaatccaacgtggtcaagtattatctaaaccaggttcaatcactccgyacactaagttcgaagctgaagtgtacgtattgtctaaagaagaaggtggtcgtcacactccattcttctctaactaccgtccacaattctacttccgtacaactgacgtaactggtgttgttactttaccagaaggtactgaaatggttatgccaggcgacaacgtacaaatggttgttgaattgatccacccaatcgcgatcgaagaa

SEQ ID NO: 1717 - DNA, 814 bp, Corynebacterium accolens
  ref <308>: DATABASE ACCESSION NUMBER: ATCC 49725
cggcgctatcctggttgttgctgcaaccgatggcccgatgccgcagacccgcgagcacgttctgcttgctcgccaggttggcgttccttacatcctcgttgcactgaacaagtgcgacatggttgatgatgaggaaatcatcgagctcgtggagatggagatctccgagctgctcgcagagcaggactacgatgaggaagctcctatcgttcacatctccgctctgaaggcactcgagggtgacgagaagtgggtacagtccatcgttgacctgatggatgcctgcgacaactccatccctgatccggagcgcgctaccgatcagccgttcttgatgcctatcgaggacatcttcaccattaccggccgcggtaccgttgttaccggccgtgttgagcgtggtcgtctgaacgtcaacgaggacgttgagatcatcggtatccaggagaagtcccagaacaccaccgttaccggtatcgagatgttccgcaagatgatggactacaccgaggctggcgacaactgtggtctgcttctgcgtggtaccaagcgtgaggacgttgagcgtggccaggttgttatcaagccgggcgcttacacccctcacaccaagttcgagggttccgtctacgtcctgaagaaggaagagggcggccgccacaccccgytcatgaacaactaccgtcctcagttctacttccgcaccaccgacgttaccggtgttgtgaacctgcctgagggcaccgagatggttatgcctggcgacaacgttgagatgtctgttgagctcatccagcctgttgctatggacgag

SEQ ID NO: 1718 - DNA, 814 bp, Corynebacterium genitalium
  ref <308>: DATABASE ACCESSION NUMBER: ATCC 33031
cggcgccatcctggttgttgctgcaaccgatggcccgatgccgcagacccgtgagcacgttctgctggctcgccaggttggcgttccgtacatcctagttgcactgaacaagtgcgacatggttgatgatgaggagctgctggagctcgtcgagatggaggtccgcgagctgctggctgagcaggacttcgacgaggaagcacctgttgttcacatctccgcactgaaggccctggagggcgacgagaagtgggctaagcagatcctggagctcatggaggcttgcgacaactccatcccggatccggagcgcgagaccgacaagccgttcctgatgccggttgrggacatcttcaccattaccggccgcggtaccgttgttaccggccgtgttgagcgtggcgtcctgaacctgaacgacgaggtcgagatcctgggcatccgcgagaagtccaccaagaccaccgttacctccatcgagatgttcaacaagctgctggacaccgcagaggctggcgacaacgccgcactgctgctgcgtggcctgaagcgcgaagatgttgagcgtggtcagatcgttgctaagccgggcgagtacaccccgcacaccgagttcgagggctccgtctacgttctgtccaaggacgagggtggccgccacaccccgttcttcgacaactaccgtccgcagttctatttccgcaccaccgacgttaccggtgttgtgaagctgccggagggcaccgagatggttatgccgggcgacaacgttgacatgtccgtcaccctgatccagccggttgctatggacgag

SEQ ID NO: 1719 - DNA, 814 bp, Corynebacterium jeikeium
  ref <308>: DATABASE ACCESSION NUMBER: ATCC 43216
cggcgccatcctggttgttgccgcaaccgatggcccgatgccgcagacccgcgagcacgttctgctggcycgccaggttggcgttccgtacatcctggttgcactgaacaagtgtgacatggttgacgatgaggagctgctggagctcgtcgagatggaggtccgcgagctgctggctgagcaggacttcgacgaggaagctccggttgttcacatctccgcactgaaggccctggagggcgacgagaagtgggctaaccagattctcgagctgatgcaggcttgcgacgagtctatcccggatccggagcgcgagaccgacaagccgttcctgatgccggttgwggacatcttcaccattaccggtcgcggtaccgttgttaccggccgtgttgagcgtggcatcctgaacctgaacgacgaggttgagatcctgggtatccgcgagaagtcccagaagaccaccgttacctccatcgagatgttcaacaagctgctggacaccgcagaggctggcracaacgctgcactgctgctgcgtggtctgaagcgcgaggacgttgagcgtggccagatcatcgctaagccgggcgagtacaccccgcacaccgagttcgagggctccgtctacgttctgtccaaggacgagggcggccgccacaccccgttcttcgacaactaccgtccgcagttctacttccgcaccaccgacgttaccggtgttgtgaagctgcctgagggcaccgagatggttatgccgggcgacaacgtygacatgtccgtcaccctgatccagccggttgctatggacgag

SEQ ID NO: 1720 - DNA, 748 bp, Corynebacterium pseudodiphtheriticum
  ref <308>: DATABASE ACCESSION NUMBER: ATCC 10700
cggcgctatcttggttgttgcagctaccgacggcccaatgccacagactcgcgagcacgttctgctggctcgccaggttggcgttccttacatcctggttgcactaaacaagtgcgacatggttgacgacgaggaaatcctcgagctcgtcgagatggagatccgcgaattgctggctgaccaggaattcgacgaagaagctccaatcgttcacatctccgcagtcggcgccttggaaggcgaagagaggtgggttaacgccatcgttgaactgatggatgcttgtgacgagtcgatccctgatccagaccgtgctaccgacaagccattcctgatgcctatcgaggacatcttcaccattaccggtcgtggcaccgttgttacgggtcgtgttgagcgtggttccctgaaggtcaacgaagaagtcgagatcatcggcatcaaggaaaagtcccagaagaccaccatcaccggtatcgaaatgttccgcaagatgctggactacaccgaggccggcgacaacgctggtctgctgcttcgcggtaccaagcgtgaagacgttgagcgtggacaggttatcgttgctccaggtgcttacagcacccacaagaagttcgaaggttccgtctacgttctttccaaggacgagggcggccgccacaccccgttcttcgacaactaccgtcctcagttctacttccgcaccaccgacgttaccggtgttgttaccctgcctgagggcaccgag

SEQ ID NO: 1721 - DNA, 813 bp, Corynebacterium striatum
  ref <308>: DATABASE ACCESSION NUMBER: ATCC 6940
ggcgctatcttggttgttgctgcaaccgatggcccgrtgccgcagacccgcgagcacgttcttctggctcgccaggttggcgttccttacatcctcgttgcactgaacaagtgcgacatggttgacgacgaggaaattatcgagctcgtcgagatggagatccgcgaactgctcgcagagcaggactacgatgaggaagctccgatcgttcacatctctgctctgaaggctcttgagggcgrcgagaagtgggtacaggctatcgttgacctgatgcaggcttgcgatgactccatcccggatccggagcgcgagctggacaagccgttcctgatgccaatcgaggacatcttcaccatcaccggccgcggtaccgttgttactggccgtgttgagcgtggctccctgaacgtcaacgaggacgttgagatcatcggtatccaggacargtccatctccaccaccgttaccggtatcgagatgytccgcaagatgatggactacaccgaggctggcgacaactgtggtctgcttctgcgtggtaccaagcgtgaagaggttgagcgcggccaggttgttattaagccgggcgcttacacccctcacacccagttcgagggttccgtctacgtcctgaagaaggaagagggcggccgccacaccccgttcatggacaactaccgtccgcagttctacttccgcaccaccgacgttaccggcgtcatcaagctgcctgagggcaccgagatggttatgcctggcgacaacgtcgagatgtcygtcgagctgatccagccggtcgctatggacgag

SEQ ID NO: 1722 - DNA, 817 bp, Enterococcus avium
  ref <308>: DATABASE ACCESSION NUMBER: ATCC 14025
cggagctatcttagtagtatctgctgctgatggccctatgcctcaaactcgtgaacacatcttgttatctcgtaacgttggtgttccttacatcgttgtattcttaaacaaaatggatatggttgacgatgaagaattacttgaattagttgaaatggaagttcgtgacttattaactgaatacgacttcccaggcgacgacactccagttatcgcaggttcagcgttgaaagctttagaaggcgacgcttcatacgaagaaaaaatcttagaattaatggctgctgttgacgaatatatcccaacaccagttcgtgatactgacaaaccattcatgatgccagtcgaagacgtattctcaatcactggtcgtggtactgttgcaactggtcgtgttgaacgtggacaagttcgcgttggtgacgaagttgaaatcgtaggtatcgctgacgaaactgctaaaacaactgttacaggtgttgaaatgttccgtaaattgttagactacgctgaagcaggtgacaacatcggtgctttgttacgtggtgttgcacgtgaagatatccaacgtggacaagtattggctaaaccagcttcaatcactccacatacaaaattctctgcagaagtttatgttctaactaaagaagaaggtggacgtcatactccattcttcactaactaccgtcctcagttctacttccgtacaactgacgtaactggtgtagttgatctaccagaaggtactgaaatggtwatgcctggggataacgtaactatggaagttgaattgatycacccaatygcggtagaagac

SEQ ID NO: 1723 - DNA, 823 bp, Gardnerella vaginalis
  ref <308>: DATABASE ACCESSION NUMBER: ATCC 14018
tggcgcaatcctcgtggttgctgctaccgacggtccaatggctcagacccgtgaacacgtcttgcttgctaagcaggtcggcgttccaaaaattcttgttgctttgaacaagtgcgatatggttgacgacgaagagcttatcgatctcgttgaagaagaggtccgtgacctcctcgaagaaaacggcttcgatcgcgattgcccagtcytccgtacttccgcttacggcgctttgcatgatgacgctccagaccacgacaagtgggtagagaccgtcaaggaactcatgaaggctgttgacgagtacatcccaaccccaactcacgatcttgacaagccattcttgatgccaatcgaagatgtgttcaccatctccggtcgtggtyccgttgtcaccggtcgtgttgagcgtggtaagctcccaatcaacaccccagttgagatcgttggtttgcgcgatacccagaccaccaccgtcacctctatcgagaccttccacaagcagatggatgaggcagaggctggcgataacactggtcttcttctccgcggtatcaaccgtaccgacgttgagcgtggtcaggttgtggctgctccaggttctgtgactccacacaccaagttcgaaggcgaagtttacgtcttgaccaaggacgaaggtggccgtcactcgccattcttctccaactaccgtccacagttctacttccgtaccaccgatgttactggcgttatcaccttgccagacggcatcgaaatggttcagccaggcgatcacgcaaccttcactgttgagttgatccaggctatcgcaatggaagag

SEQ ID NO: 1724 - DNA, 817 bp, Listeria innocua
  ref <308>: DATABASE ACCESSION NUMBER: ATCC 33090
cggagctatcttagtagtatctgctgctgatggcccaatgccacaaactcgtgaacatatcttactttcacgtcaagttggtgttccatacatcgttgtattcatgaacaaatgtgacatggttgacgatgaagaattactagaattagttgaaatggaaattcgtgatctattaactgaatatgaattccctggcgatgacattcctgtaatcaaaggttcagctcttaaagcacttcaaggtgaagctgactgggaagctaaaattgacgagttaatggaagctgtagattcttacattccaactccagaacgtgatactgacaaaccattcatgatgccagttgaggatgtattctcaatcactggtcgtggaacagttgcaactggacgtgttgaacgtggacaagttaaagttggtgacgaagtagaagttatcggtattgaagaagaaagcaaaaaagtagtagtaactggagtagaaatgttccgtaaattactagactacgctgaagctggcgacaacattggcgcacttctacgtggtgttgctcgtgaagatatccaacgtggtcaagtattagctaaaccaggttcgattactccacacactaacttcaaagctgaaacttatgttttaactaaagaagaaggtggacgtcacactccattcttcaacaactaccgcccacaattctatttccgtactactgacgtaactggtattgttacacttccagaaggtactgaaatggtaatgcctggtgataacattgagcttgcagttgaactaattgcaccaatcgctatcgaagac

SEQ ID NO: 1725 - DNA, 818 bp, Listeria ivanovii
  ref <308>: DATABASE ACCESSION NUMBER: ATCC 19119
cggagctatcttagtagtatctgctgctgatggtccaatgccacaaactcgtgaacatattcttactttcacgtcaagttggtgttccatacatcgttgtattcatgaacaaatgtgacatggttgacgatgaagaattacttgaattagttgaaatggaaattcgtgatctattaactgaatatgaattccctggcgacgacattcctgtaatcaaaggttcagctcttaaagcacttcaaggtgaagctgattgggaagctaaaattgacgagttaatggaagctgtagattcttacattccaactccagaacgtgatactgacaaaccattcatgatgccagttgaggatgtattctcaatcactggtcgtggaacagttgcaactggacgtgttgaacgtggacaagttaaagttggtgacgaagtagaagttatcggtattgaagaagaaagcaaaaaagtagtagtaactggagtagaaatgttccgtaaattactagactacgctgaagctggcgacaacattggcgcacttctacgtggtgttgctcgtgaagatatccaacgtggtcaagtattagctaaaccaggttcgattactccacatactaacttcaaagctgaaacttatgttttaactaaagaagaaggtggacgtcatactccattcttcaacaactaccgcccacaattctatttccgtactactgacgtaactggtattgttacacttccagaaggtactgaaatggtaatgcctggtgataacattgagcttgcagttgaactaattgcaccaatcgctatcgaagac

SEQ ID NO: 1726 - DNA, 817 bp, Listeria monocytogenes
  strain LSPQ 5093202
cggagctatcttagtagtatctgctgctgatggcccaatgccacaaactcgtgaacatatcttactttcacgtcaagttggtgttccatacatcgttgtattcatgaacaaatgtgacatggttgacgatgaagaattactagaattagttgaaatggaaattcgtgatctattaactgaatatgaattccctggcgatgacattcctgtaatcaaaggttcagctcttaaagcacttcaaggtgaagctgactgggaagctaaaattgacgagttaatggaagctgtagattcttacattccaactccwgaacgtgatactgacaaaccattcatgatgccagttgaggatgtattctcaatcactggtcgtggaacagttgcaactggacgtgttgaacgtggacaagttaaagttggtgacgaagtagaagttatcggtatcgaagaagaaagcaaaaaagtagtagtaactggagtagaaatgttccgtaaattactagactacgctgaagctggcgacaacattggcgcacttctacgtggtgttgctcgtgaagatatccaacrtggtcaagtattagctaaaccaggttcgattactccacacactaacttcaaagctgaaacttatgttttaactaaagaagaaggtggacgtcacactccattcttcaacaactaccgcccacaattctatttccgtactactgacgtaactggtattgttacacttccagaaggtactgaaatggtaaygcctggtgataacattgagcttgcagttgaactaattgcaccaatcgctatcgaagac

SEQ ID NO: 1727 - DNA, 817 bp, Listeria seeligeri
  ref <308>: DATABASE ACCESSION NUMBER: ATCC 35967
cggagctatcttagtagtatctgctgctgatggcccaatgccacaaactcgtgaacatatcttactttcacgtcaagttggtgttccatacatcgttgtattcatgaacaaatgtgacatggttgacgatgaagaattacttgaattagttgaaatggaaattcgtgatctattaactgaatatgaattccctggtgatgacattcctgtaatcaaaggttcagctcttaaagcacttcaaggtgaagctgactgggaagctaaaattgacgagttaatggaagctgtagattcttacattccaactccagaacgtgatactgacaaaccattcatgatgccagttgaggatgtattctcaatcactggtcgtggaactgttgcaactggacgtgttgaacgtggacaagttaaagttggtgacgaagtagaagttatcggtattgaagaagaaagcaaaaaagtaatagtaactggagtagaaatgttccgtaaattactagactacgctgaagctggcgacaacattggcgcacttctacgtggtgttgctcgtgaagatatccaacgtggtcaagtattagctaaaccaggttcgattactccacatactaacttcaaagctgaaacttatgttttaactaaagaagaaggtggacgtcacactccattcttcaacaactaccgcccacaattctatttccgtactactgacgtaactggtattgttacacttccagaaggtactgaaatggtaatgcctggtgataacattgagcttgcagttgaactaattgcaccaatcgctatcgaagac

SEQ ID NO: 1728 - DNA, 814 bp, Staphylococcus aureus
  ref <308>: DATABASE ACCESSION NUMBER: ATCC 25923
cggtggtatcttagtagtatctgctgctgacggtccaatgccacaaactcgtgaacacattcttttatcacgtaacgttggtgtaccagcattagtagtattcttaaacaaagttgacatggttgacgatgaagaattattagaattagtagaaatggaagttcgtgacttattaagcgaatatgacttcccaggtgacgatgtacctgtaatcgctggttcagcattaraagctttagaaggcgatgctcaatacgaagaaaaaatcttagaattartggaagctgtagatacttacattccaactccagaacgtgattctgacaaaccattcatgatgccagttgaggacgtattctcaatcactggtcgtggtactgttgctacaggccgtgttgaacgtggtcaaatcaaagttggtgaagaagttgaaatcatcggtttacatgacacatctaaaacaactgttacaggtgttgaaatgttccgtaaattattagactacgctgaagctggtgacaacattggtgcattattacgtggtgttgctcgtgaagacgtacaacgtggtcaagtattagctgctcctggttcaattacaccacatactgaattcaaagcagaagtatacgtattatcaaaagacgaaggtggacgtcacactccattcttctcaaactatcgtccacaattctatttccgtactactgacgtaactggtgttgttcacttaccagaaggtactgaaatggtaatgcctggtgataacgttgaaatgacagtagaattaatcgctccaatcgcgattgaagac

SEQ ID NO: 1729 - DNA, 817 bp, Staphylococcus saprophyticus
  ref <308>: DATABASE ACCESSION NUMBER: ATCC 15305
cggagctatcttagtagtatctgctgctgatggcccaatgccacaaactcgtgaacacattcttttatcacgtracgttggtgytccagcattagttgtattcttaaacaaagttgacatggttgacgaygaagaattattagaattrgtagaaatggaagttcgtgrcttattaagcgaatatgacttcccaggtgacgatgtacctgtaatctctggttctgcattaaaagctttagaaggcgacgctgactatgagcaaaaaatcttagacttaatgcaagctgttgatgactycattccaacaccagaacgtgattctgacaaaccattcatgatgccagttgaggacgtattctcaatcactggtcgtggtactgttgctacaggccgtgttgaacgtggtcaaatcaaagtcggtgaagaaatcgaratcatcggtatgcaagaagaatcaagcaaaacaactgttactggtgtagaaatgttccgtaaattattagactacgctgaagctggtgacaacattggtgcattattacgtggtgtttcacgtgatgatgtacaacgtggtcaagttttagctgctcctggtactatcacaccacatacaaaattcaaagcggatgtttacgttttatctaaagatgaaggtggtcgtcatacgccattcttcactaactaccgcccacaattctatttccgtactactgacgtaactggtgttgttaacttaccagaaggtactgaaatggttatgcctggcgataacgttgaaatggatgttgaattaatttctccaatcgctattgaagac

SEQ ID NO: 1730 - DNA, 817 bp, Staphylococcus simulans
  ref <308>: DATABASE ACCESSION NUMBER: ATCC 27848
cggcggtatcttagtagtatctgctgcagatggtccaatgccacaaactcgtgaacacatcttattatcacgtaacgttggtgtaccagctttagttgtattcttaaacaaagctgacatggttgacgacgaagaattattagaattagttgaaatggaagttcgtgacttattatctgaatacgacttccctggtgacgatgtaccagttatcgttggttctgcattaaaagctttagaaggcgacccagaatacgaacaaaaaatcttagacttaatgcaagctgtagatgactacatcccaactccagaacgtgactctgataaaccattcatgatgccagttgaggacgtattctcaatcactggtcgtggtactgtagcaacaggccgtgttgaacgtggtcaaatcaaagtcggtgaagaagttgaaatcatcggtatcactgaagaaagcaagaaaacaacagttacaggtgtagaaatgttccgtaaattattagactacgctgaagctggtgacaacatcggtgctttattacgtggtgttgcacgtgaagacgtacaacgtggacaagtattagcagctcctggctctattactccacacacaaaattcaaagctgatgtttacgttttatctaaagaagaaggtggacgtcatactccattcttcactaactaccgcccacaattctacttccgtactactgacgtaactggcgttgttcacttaccagaaggtactgaaatggttatgcctggcgataacgtagaaatgactgttgaattgatcgctccaatcgcgattgaagac

SEQ ID NO: 1731 - DNA, 817 bp, Streptococcus agalactiae
  ref <308>: DATABASE ACCESSION NUMBER: ATCC 27591
cggagctatccttgtagttgcttcaactgatggaccaatgccacaaactcgtgagcacatccttctttcacgtcaagttggtgttaaacaccttatcgtattcatgaacaaagttgaccttgttgatgatgaagaattgcttgaattggttgaaatggaaattcgtgaccttctttcagaatacgacttcccaggtgatgaccttccagttatccaaggttcagctcttaaagcacttgaaggcgacgaaaaatacgaagacatcatcatggaattgatgagcactgttgatgagtacattccagaaccagaacgtgatactgacaaacctttacttcttccagttgaagatgtattctcaatcactggacgtggtacagttgcttcaggacgtatcgaccgtggtactgttcgtgtcaacgacgaagttgaaatcgttggtattaaagaagatatccaaaaagcagttgttactggtgttgaaatgttccgtaaacaacttgacgaaggtcttgcaggggacaacgttggtgttcttcttcgtggtgttcaacgtgatgaaatcgaacgtggtcaagttcttgctaaaccaggttcaatcaacccacacactaaatttaaaggtgaagtttacatcctttctaaagaagaaggtggacgtcatactccattcttcaacaactaccgtccacaattctacttccgtacaactgacgtaacaggttcaatcgaacttccagcaggaacagaaatggttatgcctggtgataacgttactatcgaagttgaattgattcacccaatcgccgtagaacaa

SEQ ID NO: 1732 - DNA, 817 bp, Streptococcus pneumoniae
  ref <308>: DATABASE ACCESSION NUMBER: ATCC 27336
cggagctatccttgtagtagcttcaactgacggaccaatgccacaaactcgtgagcacatccttctttcacgtcaggttggtgttaaacaccttatcgtcttcatgaacaaagttgacttggttgacgacgaagaattgcttgaattggttgaaatggaaatccgtgacctattgtcagaatacgacttcccaggtgacgatcttccagttatccaaggttcagcacttaaagctcttgaaggtgactctaaatacgaagacatcgttatggaattgatgaacacagttgatgagtatatcccagaaccagaacgtgacactgacaaaccattgcttcttccagtcgaggacgtattctcaatcactggacgtggtacagttgcttcaggacgtatcgaccgtggtatcgttaaagtcaacgacgaaatcgaaatcgttggtatcaaagaagaaactcraaaagcagttgttactggtgttgaaatgttccgtaaacaacttgacgaaggtcttgctggagataacgtaggtgtccttcttcgtggtgttcaacgtgatgaaatcgaacgtggacaagttatcgctaaaccaggttcaatcaacccacacactaaattcaaaggtgaagtctacatccttactaaagaagaaggtggacgtcacactccattcttcaacaactaccgtccacaattctacttccgtactactgacgttacaggttcaatcgaacttccagcaggtactgaaatggtaatgcctggtgataacgtgacaatcgacgttgagttgattcacccaatcgccgtagaacaa

SEQ ID NO: 1733 - DNA, 817 bp, Streptococcus salivarius
  ref <308>: DATABASE ACCESSION NUMBER: ATCC 7073
cggtgcgatccttgtagtagcatctactgacggaccaatgccacaaactcgtgagcacatccttctttcacgtcaggttggtgttaaacaccttatcgtcttcatgaacaaagttgacttggttgacgatgaagaattgcttgaattggttgaaatggaaatccgtgaccttctttcagaatacgatttcccaggtgatgacattccagttatccaaggttcagctcttaaagctcttgaaggtgattctaaatacgaagacatcatcatggacttgatgaacactgttgacgaatacatcccagaaccagaacgtgacactgacaaaccattgttgcttccagtcgaagacgtattctcaatcactggtcgtggtactgttgcttcaggacgtatcgaccgtggtgttgttcgtgtcaatgacgaagttgaaatcgttggtcttaaagaagacatccaaaaagcagttgttactggtgttgaaatgttccgtaaacaacttgacgraggtattgccggagataacgtcggtgttcttcttcgtggtatccaacgtgatgaaatcgaacgtggtcaagtattggctgcacctggttcaatcaacccacacactaaattcaaaggtgaagtttacatcctttctaaagaagaaggtggacgtcacactccattcttcaacaactaccgtccacagttctacttccgtacaactgacgtaacaggttcaatcgaacttcctgcaggtactgaaatggttatgcctggtgataacgtgactatcgacgttgagttgatccacccaatcgccgttgaacaa

SEQ ID NO: 1734 - DNA, 897 bp, Agrobacterium tumefaciens
aacatgatcaccggtgctgccgagatggacggcgcgatcctggtttgctcggctgccgacggcccgatgccacagacccgcgagcacatcctgcttgcccgtcaggtgggcgttccggccatcgtcgtgttcctcaacaaggtcgaccaggttgacgacgccgagcttctcgagctcgtcgagcttgaagttcgcgaacttctgtcgtcctacgacttcccgggcgacgatatcccgatcatcaagggttcggcacttgctgctcttgaagattctgacaagaagatcggtgaagacgcgatccgcgagctgatggctgctgtcgacgcctacatcccgacgcctgagcgtccgatcgaccagccgttcctgatgccgatcgaagacgtgttctcgatctcgggtcgtggtacggttgtgacgggtcgcgttgagcgcggtatcgtcaaggttggtgaagaagtcgaaatcgtcggcatccgtccgacctcgaagacgactgttaccggcgttgaaatgttccgcaagctgctcgaccagggccaggccggcgacaacatcggtgcactcgttcgcggcgttacccgtgacggcgtcgagcgtggtcagatcctgtgcaagccgggttcggtcaagccgcacaagaagttcatggcagaagcctacatcctgacgaaggaagaaggcggccgtcatacgccgttcttcacgaactaccgtccgcagttctacttccgtacgactgacgttaccggtatcgtttcgcttcctgaaggcacggaaatggttatgcctggcgacaacgtcactgttgaagtcgagctgatcgttccgatcgcgatggaagaaaagctgcgcttcgctatccgcgaaggcggccgtaccgtcggcgccggc

SEQ ID NO: 1735 - DNA, 885 bp, Bacillus subtilis
  strain 168
atgatcactggtgctgcgcaaatggacggagctatccttgtagtatctgctgctgatggcccaatgccacaaactcgtgagcacatccttctttctaaaaacgttggtgtaccatacatcgttgtattcttaaacaaatgcgacatggtagacgacgaagagcttcttgaactagttgaaatggaagttcgcgatcttcttagcgaatacgacttccctggtgatgatgtaccagttgttaaaggttctgctcttaaagctcttgaaggagacgctgagtgggaagctaaaatcttcgaacttatggatgcggttgatgagtacatcccaactccagaacgcgacactgaaaaaccattcatgatgccagttgaggacgtattctcaatcactggtcgtggtacagttgctactggccgtgtagaacgcggacaagttaaagtcggtgacgaagttgaaatcatcggtcttcaagaagagaacaagaaaacaactgttacaggtgttgaaatgttccgtaagcttcttgattacgctgaagctggtgacaacattggtgcccttcttcgcggtgtatctcgtgaagaaatccaacgtggtcaagtacttgctaaaccaggtacaatcactccacacagcaaattcaaagctgaagtttacgttctttctaaagaagagggtggacgtcatactccattcttctctaactaccgtcctcagttctacttccgtacaactgacgtaactggtatcatccatcttccagaaggcgtagaaatggttatgcctggagataacactgaaatgaacgttgaacttatttctacaatcgctatcgaagaaggaactcgtttctctattcgtgaaggcggacgtactgttggt

SEQ ID NO: 1736 - DNA, 882 bp, Bacteroides fragilis
  DSM 2151
atggttactggtgctgctcagatggacggtgctatcattgtagttgctgctactgatggtccgatgcctcagactcgtgagcacatccttttggctcgtcaggtaaacgttccgaagctggttgtattcatgaacaagtgcgatatggttgaagatgctgagatgttggaacttgttgaaatggaaatgagagaattgctttcattctatgatttcgacggtgacaatactccgatcattcagggttctgctcttggtgcattgaacggcgtagaaaaatgggaagacaaagtaatggaactgatggaagctgttgatacttggattccactgcctccgcgcgatgttgataaacctttcttgatgccggtagaagacgtgttctctatcacaggtcgtggtactgtagctacaggtcgtatcgaaactggtgttatccatgtaggtgatgaaatcgaaatcctcggtttgggtgaagataagaaatcagttgtaacaggtgttgaaatgttccgcaaacttctggatcagggtgaagctggtgacaacgtaggtctgttgcttcgtggtgttgacaagaacgaaatcaaacgtggtatggttctttgtaaaccgggtcagattaaacctcactctaaattcaaagcagaggtttatatcctgaagaaagaagaaggtggtcgtcacactccattccataacaaatatcgtcctcagttctacctgcgtactatggactgtacaggtgaaatcactcttccggaaggaactgaaatggtaatgccgggtgataacgtaactatcactgtagagttgatctatccggttgcactgaacatcggtcttcgtttcgctatccgcgaaggtggacgtacagtaggt

SEQ ID NO: 1737 - DNA, 888 bp, Borrelia burgdorferi
  strain U78183
aatatgattacaggagcagctcaaatggatgcagcgatacttttagttgctgctgatagtggtgctgagcctcaaacaaaagagcatttgcttcttgctcaaagaatgggaataaagaaaataatagtttttttaaataaattggacttagcagatcctgaacttgttgagcttgttgaagttgaagttttagaacttgttgaaaaatatggcttttcagctgatactccaataatcaaaggttcagcttttggggctatgtcaaatccagaagatcctgaatctacaaaatgcgttaaagaacttcttgaatctatggataattattttgatcttccagaaagagatattgacaagccatttttgcttgctgttgaagatgtattttctatttcaggaagaggcactgttgctactgggcgtattgaaagaggtattattaaagttggtcaagaagttgaaatagttggaattaaagaaaccagaaaaactactgttactggtgttgaaatgttccagaaaattcttgagcaaggtcaagcaggggataatgttggtcttcttttgagaggcgttgataaaaaagacattgagagggggcaagttttgtcagctccaggtacaattactccacacaagaaatttaaagcttcaatttattgtttgactaaagaagaaggcggtaggcacaagccatttttcccagggtatagaccacagttcttttttagaacaaccgatgttactggagttgttgctttagagggcaaagaaatggttatgcctggtgataatgttgatattattgttgagctgatctcttcaatagctatggataagaatgtagaatttgctgttcgagaaggtggaagaaccgttgcttcagga

SEQ ID NO: 1738 - DNA, 894 bp, Brevibacterium linens
  DSM 20425
aacatgatcaccggtgccgctcagatggacggtgcgatcctcgtcgtcgccgctaccgacggaccgatgccccagacccgtgagcacgtgctgctcgcgcgtcaggtcggcgttccctacatcgtcgtggctctgaacaagtccgacatggtcgatgacgaggagctcctcgagctcgtcgaattcgaggtccgcgacctgctctcgagccaggacttcgacggagacaacgctccggtcattccggtgtccgctctcaaggcgctggaaggcgacgagaagtgggtcaagagcgttcaggatctcatggctgccgtcgatgacaacgttccggagccggagcgcgatgtcgacaagccgttcctcatgcccgtcgaggacgtcttcacgatcaccggtcgtggaaccgtcgtcaccggtcgtgtcgagcgcggcgtgctcctgcctaacgacgaaatcgaaatcgtcggcatcaaggagaagtcgtccaagacgactgtcaccgctatcgagatgttccgcaagaccctgccggatgcccgtgcaggtgagaacgtcggtctgctcctccgcggcaccaagcgcgaggatgttgagcgcggtcaggtcatcgtgaagccgggttcgatcaccccgcacaccaagttcgaggctcaggtctacatcctgagcaaggacgagggcggacgtcacaacccgttctactcgaactaccgtccgcagttctacttccggaccacggacgtcaccggtgtcatcacgctgcccgagggcaccgagatggtcatgcccggcgacaacaccgatatgtcggtcgagctcatccagccgatcgctatggaggaccgcctccgcttcgcaatccgcgaaggtggccgcaccgtcggcgccggt

SEQ ID NO: 1739 - DNA, 888 bp, Chlamydia trachomatis
  strain F/IC-Cal-13
atgatcacgggcgcagcgcagatggacggcgcgatcctggtttgctcggcagcagacggcccgatgccgcaaacgcgtgagcacatcctgctggcgcgtcaggttggtgttccgtacatcatcgtgttcctgaacaagtgcgacagtgtggacgacgctgaactgctcgagctggtcgagatggaagttcgcgaactcctgtcgaagtacgacttcccgggcgacgacacgccgatcgtgaagggttcggccaagctggcgctggaaggcgacacgggcgagctgggcgaagtggcgatcatgagcctggcagacgcgctggacacgtacatcccgacgccggagcgtgcagttgacggcgcgttcctgatgccggtggaagacgtgttctcgatctcgggccgtggtacggtggtgacgggtcgtgtcgagcgcggcatcgtgaaggtcggcgaagaaatcgaaatcgtcggtatcaagccgacggtgaagacgacctgcacgggcgttgaaatgttccgcaagctgctggaccaaggtcaggcaggcgacaacgtcggtatcctgctgcgcggcacgaagcgtgaagacgtggagcgtggccaggttctggcgaagccgggttcgatcacgccgcacacgcacttcacggctgaagtgtacgtgctgagcaaggacgaaggcggccgtcacacgccgttcttcaacaactaccgtccgcagttctacttccgtacgacggacgtgacgggctcgatcgagctgccgaaggacaaggaaatggtgatgccgggcgacaacgtgtcgatcacggtgaagctgattgctccgatcgcgatggaagaaggtctgcgcttcgcaatccgtgaaggcggccgtacggtcggc

SEQ ID NO: 1740 - DNA, 891 bp, Fibrobacter succinogenes
  strain S85
aacatggtgactggtgctgctcagatggacggcgctatcctcgttgttgccgctactgacggtccgatgccgcagactcgcgaacacatccttctcgctcaccaggttggcgtgccgaagatcgtcgtgttcatgaacaagtgcgacatggttgacgatgctgaaattctcgacctcgtcgaaatggaagttcgcgaactcctctccaagtatgacttcgacggtgacaacaccccgatcatccgtggttccgctctcaaggccctcgaaggcgatccggaataccaggacaaggtcatggaactcatgaacgcttgcgacgaatacatcccgctcccgcagcgcgataccgacaagccgttcctcatgccgatcgaagacgtgttcacgattactggccgcggcactgtcgctactggccgtatcgaacgcggtgtcgttcgcttgaacgacaaggttgaacgtatcggtctcggtgaaaccaccgaatacgtcatcaccggtgttgaaatgttccgtaagctcctcgacgacgctcaggcaggtgacaacgttggtctcctcctccgtggtgctgaaaagaaggacatcgtccgtggcatggttctcgcagctccgaagtctgtcactccgcacaccgaatttaaggctgaaatctacgttctcacgaaggacgaaggtggccgtcacacgccgttcatgaatggctaccgtccgcagttctacttccgcaccaccgacgttactggtacgatccagctcccggaaggtgtcgaaatggttactccgggtgacacggtcacgatccacgtgaacctcatcgctccgatcgctatggaaaagcagctccgcttcgctatccgtgaaggtggacgtactgttggtgctggc

SEQ ID NO: 1741 - DNA, 894 bp, Flavobacterium ferrugineum
  DSM 13524
aacatgatcaccggtgctgcccagatggacggtgctatcttagttgtggctgcatcagacggtcctatgcctcaaacaaaagaacacatcctgcttgctgcccaggtaggtgtacctaaaatggttgtgtttctgaataaagttgacctcgttgacgacgaagagctcctggagctggttgagatcgaggttcgcgaagaactgactaaacgcggtttcgacggcgacaacactccaatcatcaaaggttccgctacaggcgccctcgctggtgaagaaaagtgggttaaagaaattgaaaacctgatggacgctgttgacagctacatcccactgcctcctcgtccggttgatctgccgttcctgatgagcgtagaggacgtattctctatcactggtcgtggtactgttgctaccggtcgtatcgagcgtggccgtatcaaagttggtgagcctgttgagatcgtaggtctgcaggagtctcccctgaactctaccgttacaggtgttgagatgttccgcaaactcctcgacgaaggtgaagctggtgataacgccggtctcctcctccgtggtgttgaaaaaacacagatccgtcgcggtatggtaatcgttaaacccggttccatcactccgcacacggacttcaaaggcgaagtttacgtactgagcaaagacgaaggtggccgtcacactccattcttcaacaaataccgtcctcaattctacttccgtacaactgacgttacaggtgaagtagaactgaacgcaggaacagaaatggttatgcctggtgataacaccaacctgaccgttaaactgatccaaccgatcgctatggaaaaaggtctgaaattcgcgatccgcgaaggtggccgtaccgtaggtgcagga

SEQ ID NO: 1742 - DNA, 906 bp, Helicobacter pylori
  strain 26695
aacatgatcaccggtgcggcgcaaatggacggagcgattttggttgtttctgcagctgatggccctatgcctcaaactagggagcatatcttattgtctcgtcaagtaggcgtgcctcacatcgttgttttcttaaacaaacaagacatggtagatgaccaagaattgttagaacttgtagaaatggaagtgcgcgaattgttgagcgcgtatgaatttcctggcgatgacactcctatcgtagcgggttcagctttaagagctttagaagaagcaaaggctggtaatgtgggtgaatggggtgaaaaagtgcttaaacttatggctgaagtggatgcctatatccctactccagaaagagacactgaaaaaactttcttgatgccggttgaagatgtgttctctattgcgggtagagggactgtggttacaggtaggattgaaagaggcgtggtgaaagtaggcgatgaagtggaaatcgttggtatcagacctacacaaaaaacgactgtaaccggtgtagaaatgtttaggaaagagttggaaaaaggtgaagccggcgataatgtgggcgtgcttttgagaggaactaaaaaagaagaagtggaacgcggtatggttctatgcaaaccaggttctatcactccgcacaagaaatttgagggagaaatttatgtcctttctaaagaagaaggcgggagacacactccattcttcaccaattaccgcccgcaattctatgtgcgcacaactgatgtgactggctctatcacccttcctgaaggcgtagaaatggttatgcctggcgataatgtgaaaatcactgtagagttgattagccctgttgcgttagagttgggaactaaatttgcgattcgtgaaggcggtaggaccgttggtgctggt

SEQ ID NO: 1743 - DNA, 891 bp, Micrococcus luteus
  strain IFO 3333
aacatgatcaccggcgccgctcagatggacggcgcgatcctcgtggtcgccgctaccgacggcccgatggcccagacccgtgagcacgtgctcctggcccgccaggtcggcgtgccggccctgctcgtggccctgaacaagtcggacatggtggaggacgaggagctcctcgagcgtgtcgagatggaggtccggcagctgctgtcctccaggagcttcgacgtcgacgaggccccggtcatccgcacctccgctctgaaggccctcgagggcgacccccagtgggtcaagtccgtcgaggacctcatggatgccgtggacgagtacatcccggacccggtgcgcgacaaggacaagccgttcctgatgccgatcgaggacgtcttcacgatcaccggccgtggcaccgtggtgaccggtcgcgccgagcgcggcaccctgaagatcaactccgaggtcgagatcgtcggcatccgcgacgtgcagaagaccactgtcaccggcatcgagatgttccacaagcagctcgacgaggcctgggccggcgagaactgcggtctgctcgtgcgcggtctgaagcgcgacgacgtcgagcgcggccaggtgctggtggagccgggctccatcaccccgcacaccaacttcgaggcgaacgtctacatcctgtccaaggacgagggtgggcgtcacaccccgttctactcgaactaccgcgcgcagttctacttccgcaccaccgacgtcaccggcgtcatcacgctgcccgagggcaccgagatggtcatgcccggcgacaccaccgagatgtcggtcgagctcatccagccgatcgccatggaggagggcctcggcttcgccatccgcgagggtggccgcaccgtgggctccggc

SEQ ID NO: 1744 - DNA, 891 bp, Mycobacterium tuberculosis
  strain Erdmann
aacatgatcaccggcgccgcgcagatggacggtgcgatcctggtggtcgccgccaccgacggcccgatgccccagacccgcgagcacgttctgctggcgcgtcaagtgggtgtgccctacatcctggtagcgctgaacaaggccgacgcagtggacgacgaggagctgctcgaactcgtcgagatggaggtccgcgagctgctggctgcccaggaattcgacgaggacgccccggttgtgcgggtctcggcgctcaaggcgctcgagggtgacgcgaagtgggttgcctctgtcgaggaactgatgaacgcggtcgacgagtcgattccggacccggtccgcgagaccgacaagccgttcctgatgccggtcgaggacgtcttcaccattaccggccgcggaaccgtggtcaccggacgtgtggagcgcggcgtgatcaacgtgaacgaggaagttgagatcgtcggcattcgcccatcgaccaccaagaccaccgtcaccggtgtggagatgttccgcaagctgctcgaccagggccaggcgggcgacaacgttggtttgctgctgcggggcgtcaagcgcgaggacgtcgagcgtggccaggttgtcaccaagcccggcaccaccacgccgcacaccgagttcgaaggccaggtctacatcctgtccaaggacgagggcggccggcacacgccgttcttcaacaactaccgtccgcagttctacttccgcaccaccgacgtgaccggtgtggtgacactgccggagggcaccgagatggtgatgcccggtgacaacaccaacatctcggtgaagttgatccagcccgtcgccatggacgaaggtctgcgtttcgcgatccgcgagggtggccgcaccgtgggcgccggc

SEQ ID NO: 1745 - DNA, 891 bp, Mycoplasma genitalium
  strain G37
aatatgatcacaggtgctgcacaaatggatggagctattctagttgtttcagcaactgatagtgtgatgccccaaacccgcgagcacatcttacttgcccgccaagtaggggttcctaaaatggtagtttttctaaacaagtgtgatattgctagtgatgaagaggtacaagaacttgttgctgaagaagtacgtgatctgttaacttcctatggttttgatggtaagaacactcctattatttatggctcagctttaaaagcattggaaggtgatccaaagtgggaggctaagatccatgatttgattaaagcagttgatgaatggattccaactcctacacgtgaagtagataaacctttcttattagcaattgaagatacgatgaccattactggtagaggtacagttgttacaggaagagttgaaagaggtgaactcaaagtaggtcaagaagttgaaattgttggtttaaaaccaattagaaaagcagttgttactggaattgaaatgttcaaaaaggaacttgattcagcaatggctggtgacaatgctggggtattattacgtggtgttgaacgtaaagaagttgaaagaggtcaagttttagcaaaaccaggctctattaaaccgcacaagaaatttaaagctgagatctatgctttaaagaaagaagaaggtggtagacacactggttttttaaacggttaccgtcctcaattctatttccgtaccactgatgtaactggttctattgctttagctgaaaatactgaaatggttctacctggtgataatgcttctattactgttgagttaattgctcctatcgcttgtgaaaaaggtagtaagttctcaattcgtgaaggtggtagaactgtaggggcaggc

SEQ ID NO: 1746 - DNA, 891 bp, Neisseria gonorrhoeae
  strain MS11
aacatgattaccggcgccgcacaaatggacggtgcaatcctggtatgttctgctgccgacggccctatgccgcaaacccgcgaacacatcctgctggcccgtcaagtaggcgtaccttacatcatcgtgttcatgaacaaatgcgacatggtcgacgatgccgagctgttccaactggttgaaatggaaatccgcgacctgctgtccagctacgacttccccggcgacgactgcccgatcgtacaaggttccgcactgaaagccttggaaggcgatgccgcttacgaagaaaaaatcttcgaactggctaccgcattggacagatacatcccgactcccgagcgtgccgtggacaaaccattcctgctgcctatcgaagacgtgttctccatttccggccgcggtaccgtagtcaccggccgtgtagagcgaggtatcatccacgttggtgacgagattgaaatcgtcggtctgaaagaaacccaaaaaaccacctgtaccggcgttgaaatgttccgcaaactgctggacgaaggtcaggcgggcgacaacgtaggcgtattgctgcgcggtaccaaacgtgaagacgtagaacgcggtcaggtattggccaaacggggtactatcactcctcacaccaagttcaaagcagaagtgtacgtattgagcaaagaagagggcggcccccataccccgtttttcgccaactaccgtccccaattctacttccgtaccactgacgtaaccggcacgattactttggaaaaaggtgtggaaatggtaatgccgggtgagaacgtaaccattactgtagaactgattgcgcctatcgctatggaagaaggtctgcgctttgcgattcgcgaaggcggccgtaccgtgggtgccggc

SEQ ID NO: 1747 - DNA, 891 bp, Rickettsia prowazekii
  strain Madrid E
aatatgataactggtgccgctcagatggatggtgctatattagtagtttctgctgctgatggtcctatgcctcaaactagagaacatatattactggcaaaacaggtaggtgtacctgctatggtagtatttttgaataaagtagatatggtagatgatcctgacctattagaattagttgagatggaagtaagagaattattatcaaaatatggtttccctggtaatgaaatacctattattaaaggttctgcacttcaagctttagaaggaaaacctgaaggtgaaaaagctattaatgagttaatgaatgcagtagatacgtatatacctcagcctatagagctacaagataaaccttttttaatgccaatagaggatgtattttctatttcaggcagaggtaccgttgtaactggtagagtggagtcaggcataattaaggtgggtgaagaaattgaaatagtaggtctaaaaaatacgcaaaaaacgacttgtacaggtgtagaaatgttcagaaaattacttgatgaaggacaatctggagataatgtcggtatattactacgtggtacaaaaagagaagaagtagaaagaggacaagtacttgcaaaacctgggagcataaaaccgcatgataaatttgaagctgaagtgtatgtgcttagtaaagaggaaggtggacgtcataccccatttactaatgattatcgcccacagttctattttagaacaacagatgttaccggcacaataaaattgccttctgataagcagatggttatgcctggagataatgctactttttcagtagaattaattaagccgattgctatgcaagaagggttaaaattctctatacgtgaaggtggtagaacagtaggagccggt

SEQ ID NO: 1748 - DNA, 891 bp, Salmonella choleraesuis subsp. choleraesuis
  strain LT2 trpE9
aacatgatcaccggtgctgctcagatggacggcgcgatcctggttgttgctgcgactgacggcccgatgccgcagacccgtgagcacatcctgctgggtcgtcaggtaggcgttccgtacatcatcgtgttcctgaacaaatgcgacatggttgatgacgaagagctgctggaactggttgagatggaagttcgcgaactgctgtctcagtacgacttcccgggcgacgacactccgatcgttcgtggttctgctctgaaagcgctggaaggcgacgcagagtgggaagcgaaaatcatcgaactggctggcttcctggattcttatattccggaaccagagcgtgcgattgacaagccgttcctgctgccgatcgaagacgtattctccatctccggtcgtggtaccgttgttaccggtcgtgtagagcgcggtatcatcaaagtgggcgaagaagttgaaatcgttggtatcaaagagactcagaagtctacctgtactggcgttgaaatgttccgcaaactgctggacgaaggccgtgccggtgagaacgtaggtgttctgctgcgtggtatcaaacgtgaagaaatcgaacgtggtcaggtactggctaagccgggcaccatcaagccgcacaccaagttcgaatctgaagtgtacattctgtccaaagatgaaggcggccgtcatactccgttcttcaaaggctaccgtccgcagttctacttccgtactactgacgtgactggtaccatcgaactgccggaaggcgtagagatggtaatgccgggcgacaacatcaaaatggttgttaccctgatccacccgatcgcgatggacgacggtctgcgtttcgcaatccgtgaaggcggccgtaccgttggcgcgggc

SEQ ID NO: 1749 - DNA, 881 bp, Shewanella putrefaciens
  DSM 50426
atgatcactggtgctgcacagatggacggcgcgattctggtagtcgcttcaacagacggtccaatgccacagactcgtgagcacatcctgctttctcgtcaggttggcgtaccattcatcatcgtattcatgaacaaatgtgacatggtagatgacgaagagctgttagagctagttgagatggaagtgcgtgaactgttatcagaatacgatttcccaggtgatgacttaccggtaatccaaggttcagctctgaaagcgctagaaggcgagccagagtgggaagcaaaaatccttgaattagcagcggcgctggattcttacattccagaaccacaacgtgacatcgataagccgttcctactgccaatcgaagacgtattctcaatttcaggccgtggtacagtagtaacaggtcgtgttgagcgtggtattgtacgcgtaggcgacgaagttgaaatcgttggtgtacgtgcgacaactaagacaacgtgtactggtgtagaaatgttccgtaaactgcttgacgaaggtcgtgcaggtgagaactgtggtattttgttacgtggtactaagcgtgatgacgtagaacgtggtcaagtattagcgaagccaggttcaatcaacccacacactacttttgaatcagaagtttacgtactgtcaaaagaagaaggtggtcgtcacacgccattcttcaaaggctaccgtccacagttctacttccgtacaactgacgtaaccggtactatcgaactgccagaaggcgtagagatggtaatgccaggcgataacatcaagatggtagtgacactgatttgcccaatcgcgatggacgaaggtttacgcttcgcaatccgtgaaggcggtcgtacagtggt

SEQ ID NO: 1750 - DNA, 897 bp, Stigmatella aurantiaca
  strain DW4
aacatgatcacgggcgcggcgcagatggacggagcgattctggtggtgtccgcggccgacggcccgatgccccagacgcgtgagcacatcctgctggccaggcaggtgggcgtgccctacatcgtcgtcttcctgaacaaggtggacatgctggacgatccggagctgcgcgagctggtggagatggaggtgcgcgacctgctcaagaagtacgagttcccgggcgacagcatccccatcatccctggcagcgcgctcaaggcgctggagggagacaccagcgacatcggcgagggagcgatcctgaagctgatggcggcggtggacgagtacatcccgacgccgcagcgtgcgacggacaagccgttcctgatgccggtggaagacgtgttctccatcgcaggccgaggaacggtggcgacgggccgagtggagcgcggcaagatcaaggtgggcgaggaagtggagatcgtggggatccgtccgacgcagaagacggtcatcacgggggtggagatgttccgcaagctgctggacgagggcatggcgggagacaacatcggagcgctgctgcgaggcctgaagcgcgaggacctggagcgtgggcaggtgctggcgaactgggggagcatcaacccgcacacgaagttcaaggcgcaggtgtacgtgctgtcgaaggaagagggagggcggcacacgccgttcttcaagggataccggccgcagttctacttccggacgacggacgtgaccggaacggtgaagctgccggacaacgtggagatggtgatgccgggagacaacatcgccatcgaggtggagctcattactccggtcgccatggagaaggagctgccgttcgccatccgtgagggtggccgcacggtgggcgccggc

SEQ ID NO: 1751 - DNA, 897 bp, Thiomonas cuprina
  strain Hoe5
aacatgatcaccggtgcggcccagatggacggcgccatcctggtcgtgtccgccgccgacggccccatgccccaaacccgcgagcacatcctgctggcgcgtcaggtgggcgtgccctacatcatcgtgttcctcaacaagtgcgacatggtcgacgacgccgagctgctcgaactcgtcgagatggaagtgcgcgagctgctgtccaagtacgacttccccggtgacgacacccccatcatcaagggctcggccaagctggccctcgaaggcgacaagggcgaactgggcgaaggcgccattctcaagctggccgaggccctggacacctacatccccacgcccgagcgggccgtcgacggcgcgttcctcatgcccgtggaagacgtgttctccatctccgggcgcggcacggtggtcaccgggcgtgtggagcgcggcatcatcaaggtcggcgaggaaatcgagattgtcggcctcaagcccaccctcaagaccacctgcaccggcgtggaaatgttcaggaagctgctcgaccagggccaggccggcgacaacgtcggcatcttgctgcgcggcaccaagcgcgaggaagtcgagcgcggccaggtgctgtgcaaacccggctcgatcaagccccacacccacttcaccgccgaggtgtacgtgctgagcaaggacgagggcggccgccacacccccttcttcaacaactaccgcccgcagttctacttccgcaccaccgacgtcaccggcgccatcgaactgcccaaggacaaggaaatggtcatgcccggcgataatgtgagcatcaccgtcaagctcatcgcccccatcgccatggaagaaggcctgcgcttcgccatccgcgaaggcggccgcaccgtcggcgccggc

SEQ ID NO: 1752 - DNA, 894 bp, Treponema pallidum
  strain Nichols
aatatgatcacgggtgctgcgcagatggacggtggtattctcgtcgtgtctgcgcctgacggcgttatgccacagacgaaggagcatcttctgctcgcccgtcaggttggtgttccctccatcattgtttttttgaacaaggttgatttggttgatgatcctgagttgctagagctggtggaagaagaggtgcgtgatgcgcttgctggatatgggttttcgcgtgagacgcctatcgtcaaggggtctgcgtttaaagctctgcaggatggcgcttccccggaggatgcagcttgtattgaggaactgcttgcggccatggattcctactttgaagacccagtgcgtgacgacgcaagacctttcttgctctctatcgaggatgtgtacactatttctgggcgtggtaccgttgtcacggggcgcatcgaatgtggggtaattagtctgaatgaagaggtcgagatcgtcgggattaagcccactaagaaaacagtggttactggcattgagatgtttaataagttgcttgatcagggaattgcaggtgataacgtggggctgcttttgcgcggggtggataaaaaagaggttgagcgcggtcaggtgctttctaagcccggttctattaagccacacaccaagtttgaggcgcagatctacgtgctctctaaggaagagggtggccgtcacagtcctttttttcaaggttatcgtccgcagttttattttagaactactgacattaccggtacgatttctcttcctgaaggggtagacatggtgaagccgggggataacaccaagattataggtgagctcatccacccgatagctatggacaagggtctgaagcttgcgattcgtgaaggggggcgcactattgcttctggt

SEQ ID NO: 1753 - DNA, 891 bp, Ureaplasma urealyticum
  ref <308>: DATABASE ACCESSION NUMBER: ATCC 33697
aatatgattacaggggcagcacaaatggatggagcaattttagttattgctgcatctgatggggttatggctcaaactaaagaacatattttattagcacgtcaagttggtgttccaaaaatcgttgttttcttaaacaaatgtgatttcatgacagatccagatatgcaagatcttgttgaaatggaagttcgtgaattattatctaaatatggatttgatggcgataacacaccagttattcgtggttcaggtcttaaggctttagaaggagatccagtttgagaagcaaaaattgatgaattaatggacgcagttgattcatgaattccattaccagaacgtagtactgacaaaccattcttattagcaattgaagatgtattcacaatttcaggacgtggtacagtagtaactggacgtgttgaacgtggtgtattaaaagttaatgatgaggttgaaattgttggtctaaaagacactcaaaaaactgttgttacaggaattgaaatgtttagaaaatcattagatcaagctgaagctggtgataatgctggtattttattacgtggtattaaaaaagaagatgttgaacgtggtcaagtacttgtaaaaccaggatcaattaaacctcaccgtacttttactgctaaagtttatattcttaaaaaagaagaaggtggacgtcatacacctattgtttcaggataccgtccacaattctattttagaacaacagatgtaacaggtgctatttcattacctgctggtgttgatttggttatgccaggtgatgacgttgaaatgactgtagaattaattgctccagttgcgattgaagatggatctaaattctcaatccgtgaaggtggtaaaactgtaggtcatggt

SEQ ID NO: 1754 - DNA, 909 bp, Wolinella succinogenes
  DSM 1740
aacatgattacaggtgctgctcaaatggatggcgcgattcttgttgtttctgcggcggatggccccatgccccaaactagggagcacattcttctttctcgacaagtaggcgttccttacatcgtggttttcttgaacaaagaagatatggttgatgacgctgagcttcttgagcttgttgaaatggaagttagagaacttcttagcaactacgacttccctggagatgacactcctatcgttgcaggttccgctcttaaagctcttgaagaggctaacgaccaggaaaatgttggcgagtggggcgagaaagtattgaagcttatggctgaggttgaccgatatattcctacgcctgagcgagatgtggataagcctttccttatgcctgttgaagacgtattctccatcgcgggtcgtggaaccgttgtgacaggaagaattgaaagaggcgtggttaaagtcggtgacgaagtagaaatcgttggtatccgaaacacacaaaaaacaaccgtaactggcgttgagatgttccgaaaagagctcgacaagggtgaggcgggtgacaacgttggtgttcttttgagaggcaccaagaaagaagatgttgagagaggtatggttctttgtaaaataggttctatcactcctcacactaactttgaaggtgaagtttacgttctttccaaagaggaaggcggacgacacactccattcttcaatggataccgacctcagttctatgttagaactacagacgttaccggttctatctctcttcctgagggcgtagagatggttatgcctggtgacaacgttaagatcaatgttgagcttatcgctcctgtagccctcgaagagggaacacgattcgcgatccgtgaaggtggtcgaaccgttggtgcgggt

SEQ ID NO: 1755 - DNA, 888 bp, Burkholderia cepacia; identical to SEQ ID NO: 1739

SEQ ID NO: 1756 - DNA, 388 bp, Bacillus anthracis
  strain CIP 9444
tgaaagttcaggtaaaacaacagtttcattacacgcaattgcagaagtacagcgtcaaggtggacaagcagcgttcattgatgctgagcatgcaatggatcctgtatatgcacaaaaactaggtgttaacatcgatgaattactattatcacaacctgatacaggggagcaaggtttagaaatcgcagaagcacttgtacgaagtggtgcggttgatattatcgtaattgactctgtagcagctcttgtaccgaaagctgaaattgaaggagacatgggtgactcacacgtaggtttacaagctcgtctaatgtctcaagcacttcgtaaactttcaggtgcaatcaataaatcaaaaacaatcgcaatctttattaaccaaattcgt

SEQ ID NO: 1757 - DNA, 388 bp, Bacillus anthracis; identical to SEQ ID NO: 1756
  ref <308>: DATABASE ACCESSION NUMBER: ATCC 4229

SEQ ID NO: 1758 - DNA, 388 bp, Bacillus cereus; identical to SEQ ID NO: 1756
  ref <308>: DATABASE ACCESSION NUMBER: ATCC 7064

SEQ ID NO: 1759 - DNA, 388 bp, Bacillus cereus
  ref <308>: DATABASE ACCESSION NUMBER: ATCC 13472
tgaaagttcaggtaaaacgacagtttcattacatgcaattgcagaagtacaacgtcaaggtggacaagcagcattcatcgatgcggagcacgcaatggatcctgtatatgcacaaaaattaggcgttaacatagatgaattactattatcacagcctgatacaggggagcaaggattagaaatcgcggaagcacttgtacgaagtggtgcggttgacattatcgtaattgactctgtagcagctcttgtaccgaaagcagagattgaaggtgacatgggtgactcacacgtaggtttacaagcacgtttaatgtcacaagcacttcgtaagctttcaggagcaatcaacaaatcaaaaacaattgcaatctttattaaccaaattcgt

SEQ ID NO: 1760 - DNA, 374 bp, Bacillus mycoides
  ref <308>: DATABASE ACCESSION NUMBER: ATCC 6462
aaacgacagtttcattacatgcaattgcagaagtacaacgtcaaggtggacaagcagcattcatcgatgcggagcacgcaatggatcctgtatatgcacaaaaattaggcgttaacatagatgaattactattatcacagcctgatacaggggagcaaggattagaaatcgcagaagcacttgtacgaagtggtgcggttgacattatcgtaattgactctgtagcagctcttgtaccgaaagcagagattgaaggagacatgggtgactcacacgtaggtttacaagcacgtttaatgtcacaagcacttcgtaagctttcaggagcaatcaacaaatcaaaaacaattgcaatctttattaaccaaattcgt

SEQ ID NO: 1761 - DNA, 381 bp, Bacillus pseudomycoides
  NRRL BD-10
ggaaagttcaggtaaaacaacggtttccttacatgcgattgcagaagtgcaacgtcaaggtggacaagcggcatttattgatgcggagcatgcgatggatcctgtatatgcacaaaagttaggtgttaatattgatgagttactattatcgcagcctgatacaggagaacaaggtttagaaatcgcagaagcattagtacgaagcggtgcgattgatatcattgtaattgactctgtagcagctcttgtaccaaaagcagaaatcgaaggggaaatgggtgactcccacgttggtttacaagcgcgtttaatgtcacaagcacttcgtaagctttctggtgcgattaacaaatcaaaaacaattgcaatcttcattaacca

SEQ ID NO: 1762 - DNA, 388 bp, Bacillus thuringiensis
  strain HER 1410
tgaaagttcaggtaaaacgacagtttcattacatgcaattgcagaagtacaacgtcaaggtggacaagcagcattcatcgatgcggagcacgcaatggatcctgtatatgcacaaaaattaggcgttaacatagatgaattactattatcacagcctgatacaggggagcaaggattagaaatcgcggaagcacttgtacgaagtggtgcggttgacattatcgtaattgactctgtagcagctcttgtaccgaaagcagagattgaaggcgacatgggtgactcacacgtaggtttacaagcacgtttaatgtcacaagcacttcgtaagctttcaggagcaatcaacaaatcaaaaacaattgcaatctttattaaccaaattcgt

SEQ ID NO: 1763 - DNA, 388 bp, Bacillus thuringiensis
  strain HER 1418
tgaaagttcaggtaaaacgacagtttcattacatgcaattgcagaagtacaacgtcaaggtggacaagcagcattcattgatgcggagcacgcaatggatcctgtatatgcacaaaaattaggcgttaacatagatgaattactattatcacagcctgatacaggggagcaaggattggaaatcgcggaagcacttgtacgaagtggtgcggttgacattatcgtaattgactctgtagcagctcttgtaccgaaagcagagattgaaggcgatatgggtgactcacacgtaggtttacaagcacgtttaatgtcacaagcacttcgtaagctttcaggagcaatcaacaaatcaaaaacaattgcaatctttattaaccaaattcgt

SEQ ID NO: 1764 - DNA, 358 bp, Klebsiella oxytoca
  ref <308>: DATABASE ACCESSION NUMBER: ATCC 33496
ctcctatctggattatgcgatgtcggtcattgttggccgtgcgctgccggatgtccgagatggcctgaagccggtacaccgtcgcgtactatacgccatgaacgtattgggcaatgactggaacaaagcctataaaaaatctgcccgtgtcgtgggtgacgtcatcggtaaataccaccctcatggtgatactgccgtatacgacaccattgtacgtatggcgcagcccttctccctgcgttacatgctggtagatggccagggtaactttggttcggtcgacggcgactccgccgcagcgatgcgttatacggaaatccgtatgtcgaagatcgcccatgaactgatggccgacctc

SEQ ID NO: 1765 - DNA, 365 bp, Klebsiella pneumoniae subsp. ozaenae
  ref <308>: DATABASE ACCESSION NUMBER: ATCC 11296
ttaagaactcttatctggattatgcgatgtcggtcattgttggccgtgcgctgccggatgtccgagatggcctgaagccggtacaccgtcgcgtactttacgccatgaacgtattgggcaatgactggaacaaagcctataaaaaatcagcccgtgtcgttggtgacgtaatcggtaaataccacccgcacggcgactccgcggtatacgacaccatcgtgcgtatggcgcagccgttctcgctgcgttacatgctggtggacggccagggtaactttggttccatcgacggcgactccgccgcggcgatgcgttataccgaaattcgtctggcgaaaatcgctcatgagctgatggccgatctt

SEQ ID NO: 1766 - DNA, 344 bp, Klebsiella planticola
  ref <308>: DATABASE ACCESSION NUMBER: ATCC 33531
aagagctcgtatctggattatgcgatgtcggtcattgttggccgtgcgctgccggatgtccgagatggcctgaaaccggtacaccgtcgcgtactttacgccatgaacgtattgggcaatgactggaacaaagcctataaaaaatccgcccgtgtcgttggtgacgtaatcggtaaataccaccctcatggtgataccgccgtttatgacaccattgtacgtatggcacagccattctccttgcgttatatgctggtcgatggccagggtaacttcggttctgtcgatggcgactccgccgcagcgatgcgttatacggaaatccgtatgtcgaaaatcgccca

SEQ ID NO: 1767 - DNA, 345 bp, Klebsiella pneumoniae
  ref <308>: DATABASE ACCESSION NUMBER: ATCC 27336
aactcttatctggattatgcgatgtcggtcattgttggccgtgcgctgccggatgtccgagatggcctgaagccggtacaccgtcgcgtactttacgccatgaacgtattgggcaatgactggaacaaagcctataaaaaatcagcccgtgtcgttggtgacgtaatcggtaaataccacccgcacggcgactccgcggtatacgacaccatcgtgcgtatggcgcagccgttctcgctgcgttacatgctggtggacggccagggtaactttggttccatcgacggcgactccgccgcggcgatgcgttataccgaaattcgtctggcgaaaatcgctcatgag

SEQ ID NO: 1768 - DNA, 356 bp, Klebsiella pneumoniae subsp. pneumoniae
  ref <308>: DATABASE ACCESSION NUMBER: ATCC 13883
cttatctggattatgcgatgtcggtcattgttggccgtgcgctgccggatgtccgagatggcctgaagccggtacaccgtcgcgtactttacgccatgaacgtattgggcaatgactggaacaaagcctataaaaaatcagcccgtgtcgttggtgacgtaatcggtaaataccacccgcacggcgactccgcggtatacgacaccatcgtgcgtatggcgcagccgttctcgctgcgttacatgctggtggacggccagggtaactttggttccatcgacggcgactccgccgcggcgatgcgttataccgaaattcgtctggcgaaaatcgctcatgagctgatggccgatctt

SEQ ID NO: 1769 - DNA, 361 bp, Klebsiella pneumoniae subsp. pneumoniae
  ref <308>: DATABASE ACCESSION NUMBER: ATCC 29011
taagaactcttatctggattatgcgatgtcggtcattgttggccgtgcgctgccggatgtccgagatggcctgaagccggtacaccgtcgcgtactttacgccatgaacgtattgggcaatgactggaacaaagcctataaaaaatcagcccgtgtcgttggtgacgtaatcggtaaataccacccgcacggcgactccgcggtatacgacaccatcgtgcgtatggcgcagccgttctcgctgcgttacatgctggtggacggccagggtaactttggttccatcgacggcgactccgccgcggcgatgcgttataccgaaattcgtctggcgaaaatcgctcatgagctgatggccgat

SEQ ID NO: 1770 - DNA, 365 bp, Klebsiella pneumoniae subsp. rhinoscleromatis
  ref <308>: DATABASE ACCESSION NUMBER: ATCC 13824
taagaactcttatctggattatgcgatgtcggtcattgttggccgtgcgctgccggatgtccgagatggcctgaagccggtacaccgtcgcgtactttacgccatgaacgtattgggcaatgactggaacaaagcctataaaaaatcagcccgtgtcgttggtgacgtaatcggtaaataccacccgcacggcgactccgcggtatacgacaccatcgtgcgtatggcgcagccgttctcgctgcgttacatgctggtggacggccagggtaactttggttccatcgacggcgattccgccgcggcgatgcgttataccgaaattcgtctggcgaaaatcgctcatgagctgatggccgatcttg

SEQ ID NO: 1771 - DNA, 357 bp, Klebsiella terrigena
  ref <308>: DATABASE ACCESSION NUMBER: ATCC 33257
tcgtatctggattatgcgatgtcggtcattgttggccgtgcgctgccggatgtccgagatgggttgaaaccggtacaccgtcgcgtactttacgccatgaacgtattgggcaatgactggaacaaagcctataaaaaatccgcccgtgtcgttggtgacgtaatcggtaaatatcaccctcacggtgataccgccgtttatgacaccattgtacgtatggcgcagccattctccttgcgttatatgctggtcgatggccagggtaacttcggttctgtcgatggcgactccgccgcagcgatgcgttatacggaaatccgtatgtcgaaaatcgcccacgagctgatggccgacctc

SEQ ID NO: 1772 - DNA, 968 bp, Legionella pneumophila strain pneumophila
  ref <308>: DATABASE ACCESSION NUMBER: ATCC 33152
cagtacacaggcgagttctttttgcgatgagtgagttaagtaatgattggaataagccgtataaaaaatctgctcgtgtagtaggggatgtcattggtaaatatcatcctcatggggatacagctgtttatgacactattgttcgtatggctcagcccttttccatgcgttatatgctgattgatgggcagggtaattttggctctgtagatggagatgctccagctgccatgcgttacactgaagtaagaatgtccaaagtggcgcatgctttactggctgatttggataaggaaaccgttgattttagtcctaactatgatgaaacagaatttgctccagtggtattgccatcgagaattcccaatttactagttaatggctcttccggtattgcggtagggatggctactaatattccaccacataatcttaccgaagtaatcaatgcatgtattgctttagtggatgaacctgacacgagtcttgaagatttaatggaaattattcctggccctgattttcctacagccgcaattattaatggtcgtgctggaattattgaaggttatcgtactggaaaagggcgggttgttatcagggcacgcacagaaattgaaacggatgaaagttcaggccgtcagtcaattattattcaggaattaccctatcaggtgaataaagcgcgtttgatcgagcgtattgctgaattggtaagggacaagaaaatcgaaggaatttccggcttgagagatgagtcagacaagcaaggaatgagagtagtcattgaattaaaacgcaatgaagtagcagatgtggtattgaataacctgttcgctcatactcaaatgcaaaatgtattcggaattaatatggttgctctggtggatggccaaccgcgtactttgaatttgaagcaaatactggaatattttataaaacatcgaagagaggttgttaccagacgc

SEQ ID NO: 1773 - DNA, 967 bp, Proteus mirabilis
  ref <308>: DATABASE ACCESSION NUMBER: ATCC 25933
caccgccgagtgctatttgcgatgaatgtactgggaaacgattggaataaaccttataaaaaatcagcccgtgttgttggggatgtaatcggtaaatatcacccgcacggtgacagtgctgtctatgaaacgattgttcgtttagcacagcctttttctatgcgctacatgttggttgacggtcagggtaacttcgggtcagttgatggtgactccgcggcggctatgcgttataccgaagttcgtatggcgaagatcgcccatgaactgctggcggatttggaaaaagagacggtcgactttgttcctaactatgatggaacagaaaatataccggctgttatgccaacccgtattccaaacttgttagttaatggctcttcaggtattgccgttgggatggcaacgaatatccctccgcataacctcggtgaagttatcgacggttgtcttgcctatgttgataatgaagacatcaccatagaagaattaatggaatatattaccgggcctgattttccgactgctgcgattattaatggtcgcagaggaatattagatgcttatcgtacagggcgtggaaagatttatatccgtgctcaggctgatattgaaactgatgagaaaacaggtcgcgaaaccattatcgtgacagaaattccttatcaggtgaataaagcccgtttaattgaaaaaattgcggagcttgtaaaagataaacgtattgaaggtatcagcggattacgtgacgagtctgataaagacggtatgcgtattgttgttgagatcaaacgtgatgcagtcggtgaagtagtattaaatcacctcttttcacaaactcaaatgcaagtctcttttggtattaatatggttgcgcttcatcaaggccaaccaaaattattgaacctaaaagaaattatcgcagcctttattcgccatcgtcgtgaagtggtgactcgccgtacca

SEQ ID NO: 1774 - DNA, 978 bp, Providencia rettgeri
  ref <308>: DATABASE ACCESSION NUMBER: ATCC 9250
ccagtacaccgcagagtattgtatgcgatgaatgtattgggaaatgattggaataaaccctataaaaaatctgcccgtattgttggggacgtcatcggtaaataccatccacatggtgatagcgctgtttacgagacaatcgttcgtcttgctcagcctttctcaatgcgttacatgctggttgatggtcagggaaacttcggttctgttgacggagactccgcagcggcaatgcgttatacggaaatccgtatggcgaaaattgcccatgaactacttgctgaccttgaaaaagaaaccgttgatttcgttcctaactatgacggaacagagcacattcctgaagttatgccaacgaaaatcccaaaccttttggttaatgggtcgtcaggtattgctgttgggatggcaaccaatatcccacctcacaatttaggggaggtgattaatggttgtcttgcctatatagaagacgaagacatcagcattgatggtttaatggaacacattccagggcctgatttcccaaccgcagctattattaatggccgtcgtgggattattgatgcgtatcgcacagggcgtggcaaggtctatatccgtgcaagcgctgaagtggaagtcgatgagaaaaatggtcgcgaaaccattattgtcagcgaaattccttatcaagtgaataaagctcgcttgattgaaaaaattgctgagttagttaaagacaagcgtgttgaaggtatcagtgcactgcgtgacgagtctgataaagacggtatgcgtattgttattgaaatcaaacgcgatgcggtgggtgaagttgtactgaacaacttatattccctgacccaattgcaagtttcttttggtatcaatatggtagctctacaccaagggcagccgaaaatactgaatttaaaagatatcattgctgcttttgtgcgtcaccgccgtgaagtcgtcactcgtcgtacgattttc

SEQ ID NO: 1775 - DNA, 978 bp, Proteus vulgaris
  ref <308>: DATABASE ACCESSION NUMBER: ATCC 13315
ccagtacaccgtcgcgttcttttcgcgatgaatgtattaggaaacgattggaataaaccttataaaaaatcagcccgtgttgttggggatgttatcggtaaatatcacccgcacggtgacagtgctgtttatgaaacgatagttcgtttagcacagcctttttctatgcgttacatgttggttgacgggcagggtaacttcgggtcagttgatggtgactcggcggctgcaatgcgttataccgaagttcgtatggcgaaaatcgcccatgaactgctggcggatttggaaaaagaaacggttgattttgttcctaactatgatggaacagagcatatcccggcagtcatgccaacccgtattccaaacttattagtcaatggttcttcaggtatcgcagtcgggatggcaacaaacattcctccgcataacctaggtgaagttatcgacggctgtcttgcttatgttgataacgaagacatcactattgaagagttgatggagcatatcacggggcctgatttcccaactgccgctattattaatggccgcagaggaattttagatgcttaccgtactgggcgcggaaaaatttatattcgtgcacaagctgatgtagaaaccgatgagaaaactggtcgcgaaacaattatcgtgacggaaattccttatcaggtgaacaaagctcgcttaattgaaaaaattgcagagcttgttaaagataaacgtattgaaggcattagcggattacgtgatgagtcagataaagatggtatgcgcattgttgttgaaattaagcgtgatgctgttggtgaagttgtactaaatcacttattttctcagactcagatgcaggtttcttttggtattaacatggttgcactgcatcaaggtcaaccgaaagtgttaaacctgaaagaaattatttcagcctttattcgtcaccgtcgtgaagtggtgactcgtcgtactattttt

SEQ ID NO: 1776 - DNA, 940 bp, Yersinia enterocolitica
  ref <308>: DATABASE ACCESSION NUMBER: ATCC 9610
tgggtaatgactggaataagccatacaaaaaatcggcccgtgtagtcggggacgttatcggtaaatatcacccgcatggtgacagcgcggtctacgacacaattgtgcgtatggcccagccgttctcactgcgctatatgctggtggatgggcagggcaacttcggttccgttgatggcgactccgccgcagcgatgcgttataccgaaatccgtatgtctaaaattgctcacgaattgttggcggacttagaaaaagataccgtcgacttcgtgccgaactatgacggtacggagcaaattcctgccgtaatgccaacccgaatccctaacttgctggttaacggctcgtcaggtattgctgtcggtatggcaaccaatattccgccgcataacctttctgaggttattgatggctgtctggcctatatcgaagatgaaaacatcaccattgaagggttgatggagtacatcccggggccagatttcccaactgctgcgattatcaatggtcgccgtggtattgaagaagcttatcgtactggccgtggcaaggtgtatatccgtgcccgtgctgaagttgaggctgacgcttaaaccggtcgcgaaaccattattgttcacgagatcccgtatcaggtgaacaaggcgcggttgattgaaaaaatcgccgagctggttaaagaaaaacgcgtagaaggcatcagtgcgttgcgtgatgagtctgataaagacggcatgcgtatcgtgattgaaatcaaacgtgatgctgtcggggaagtggttctgaacaacctctattctctgacgcaattgcaggtgactttcggtatcaatatggtggctctgtctcaagggcagcctaagttgcttaacctgaaagacattttggttgctttcgtgcgccaccgccgtgaagtggtgactcgccgtaccatttt

SEQ ID NO: 1777 - DNA, 668 bp, Klebsiella oxytoca
  ref <308>: DATABASE ACCESSION NUMBER: ATCC 13182
ccgtttattggcgatggcctgaagccggtccagcgtcgcatcgtctatgcgatgtctgaactgggtctgaacgccagcgcgaagttcaaaaagtccgcccgcaccgtcggtgacgtgctgggtaaataccatccccacggcgacagcgcgtgctatgaagccatggtgctgatggctcagcccttctcctaccgctatccgctggttgacggtcagggaaactggggggcgccggacgatcctaaatccttcgccgcaatgcgttataccgaatcccgtttgtcgaagtatgctgaactgctgctgagcgaactggggcaaggcaccgttgactgggtaccaaacttcgacggcactttgcaggagccgaagatgctgcctgcgcgcctgcccaatattctgctaaacggtactaccggcattgccgttgggatggcgacggacattccgccgcacaacctgcgtgaagtggcccgggcggccattaccctgattgaaaagccgcaaacttcgctggatgacctgctggatatcgtgcaggggccggattatcctaccgaagcggaaatcattaccccccgtgccgaaatccgcaaaatctaccagaatggccgcggttcggtgcggatgcgcgcggtatgggccaaagaagacggcgcggtggtgat

SEQ ID NO: 1778 - DNA, 714 bp, Klebsiella oxytoca
  ref <308>: DATABASE ACCESSION NUMBER: ATCC 33496
gtttattggcgatggcctgaagccggtccagcgtcgcatcgtctatgcgatgtctgaactgggtctgaacgccagcgcgaagttcaaaaagtccgcccgcaccgtcggtgacgtgctgggtaaataccatccccacggcgacagcgcgtgctatgaagccatggtgctgatggctcagcccttctcctaccgctatccgctggttgacggtcagggaaactggggggcgccggacgatcctaaatccttcgccgcaatgcgttataccgaatcccgtttgtcgaagtatgctgaactgctgctgagcgaactggggcaaggcaccgttgactgggtaccaaacttcgacggcactttgcaggagccgaagatgctgcctgcgcgcctgcccaatattctgctaaacggtactaccggcattgccgttgggatggcgacggacattccgccgcacaacctgcgtgaagtggcccgggcggccattaccctgattgaaaagccgcaaacttcgctggatgacctgctggatatcgtgcaggggccggattatcctaccgaagcggaaatcattaccccccgtgccgaaatccgcaaaatctaccagaatggccgcggttcggtgcggatgcgcgcggtatgggccaaagaagacggcgcggtggtgattagcgcgctgccgcatcaggtttccggcgcccgcgtgcttgagcagat

SEQ ID NO: 1779 - DNA, 722 bp, Klebsiella pneumoniae subsp. ozaenae
  ref <308>: DATABASE ACCESSION NUMBER: ATCC 11296
ttggcgatggcttaaaaccggtccagcgtcgcatcgtctatgcgatgtccgagctggggctgaacgccagcgcgaaattcaaaaagtccgcccgcaccgtcggcgacgtgttgggtaaatatcacccgcacggcgacagcgcctgctatgaagcgatggtgctgatggcgcagccgttctcttaccgctatccgctggtggatggtcagggaaactggggggcgccggacgatcccaaatctttcgccgccatgcgttacaccgaatcccgcctgtcgaagtatgccgagctgctgctcagcgagctggggcaggggacggtcgactgggtgccaaactttgacggtacgctgcaggagccgaaaatgctgccagcgcgtttgccgaacatcctgctgaacggcaccaccggcatcgcggtaggtatggcgaccgatattcctccgcacaacctgcgggaagtggccaaagcggcgattacgctgattgagcagccgaaaaccaccctcgacgaactgctggatatcgtacaggggccggatttcccgaccgaggcggagatcatcacctcgcgggcggaaattcgaaaaatctaccagaacgggcgcggctcagtgcgcatgcgcgcggtgtggagtaaagaggacggcgcggtggtgatcagcgcgctgccgcatcaggtctccggcgccaaagtgctggagcagattgcggcgcagatg

SEQ ID NO: 1780 - DNA, 692 bp, Klebsiella planticola
  ref <308>: DATABASE ACCESSION NUMBER: ATCC 33531
gtccagcgtcgcatcgtttatgcgatgtctgagctggggctgaacgccagcgcgaagttcaaaaagtccgcccgcaccgtgggtgatgtgctgggtaaatatcacccgcacggcgatagcgcatgctatgaagctatggtgctgatggcgcagccattctcctaccgctacccgctggtggatgggcaggggaactggggggcaccggacgatcctaaatccttcgccgcgatgcgttataccgaatcccgtttgtcgaagtatgcggaactgctgctgggcgaactggggcagggaaccgtcgactgggtgccgaacttcgacgggacgatgcaggagccgaaaatgctgcctgcgcgtctgccgaatattctgctgaacggcactaccggcatcgccgtcggtatggcaaccgatattcctccgcacaacctgcgtgaagtggcgcaggcggcgattaccctgatcgaaaaaccgcagacctcgctcgacgaactgctggatatcgttcacggacccgactacccgaccgaagccgaaatcattactccacgcgcggagatccgcaaaatctaccagaacggccgcggttcggtgcggatgcgcgcggtatggaaaaaagaggacggcgcggtcgtgattacggcgttgccgcatcaggtttccggcgcccgcgtgctggagcaaattgc

SEQ ID NO: 1781 - DNA, 700 bp, Klebsiella pneumoniae
  ref <308>: DATABASE ACCESSION NUMBER: ATCC 27336
gtttattggcgatggcttaaaaccggtccagcgtcgcatcgtctatgcgatgtccgagctggggctgaacgccagcgcgaaattcaaaaagtccgcccgcaccgtcggcgacgtgttgggtaaatatcacccgcacggcgacagcgcctgctatgaagcgatggtgctgatggcgcagccgttctcttaccgctatccgctggtggatggtcagggaaactggggggcgccggacgatcccaaatctttcgccgccatgcgttacaccgaatcccgcctgtcgaagtatgccgagctgctgctcagcgagctggggcaggggacggtcgactgggtgccaaactttgacggcacgctgcaggagccgaaaatgctgccagcgcgtttgccgaacatcctgctgaacggcaccaccggcatcgcggtaggcatggcgaccgatattcctccgcacaacctgcgggaagtggccaaagcggcgattacgctgattgagcagccgaaaaccaccctcgacgaactgctggatatcgtacaggggccggatttcccgaccgaggcggagatcatcacctcgcgggcggaaattcgcaaaatctaccaaaacgggcgcggctcagtgcgcatgcgcgcggtgtggagtaaagaggacggcgcggtggtgatcagcgcgctgccgcatcaggtctccggcgccaaa

SEQ ID NO: 1782 - DNA, 726 bp, Klebsiella pneumoniae subsp. pneumoniae
  ref <308>: DATABASE ACCESSION NUMBER: ATCC 13883
attggcgatggcttaaaaccggtccagcgtcgcatcgtctatgcgatgtccgagctggggctgaacgccagcgcgaaattcaaaaagtccgcccgcaccgtcggcgacgtgttgggtaaatatcacccgcacggcgacagcgcctgctatgaagcgatggtgctgatggcgcagccgttctcttaccgctatccgctggtggatggtcagggaaactggggggcgccggacgatcccaaatctttcgccgccatgcgttacaccgaatcccgcctgtcgaagtatgccgagctgctgctcagcgagctggggcaggggacggtcgactgggtgccaaactttgacggcacgctgcaggagccgaaaatgctgccagcgcgtctgccgaacatcctgctgaacggcaccaccggcatcgcggtaggcatggcgaccgatattcctccgcacaacctgcgggaagtggccaaagcggcgattacgctgattgagcagccgaaaaccaccctcgacgaactgctggatatcgtacaggggccggatttcccgaccgaggcggagatcatcacctcgcgggcggaaattcgcaaaatctaccagaacgggcgcggctcagtgcgcatgcgcgcggtgtggagtaaagaggacggcgcggtggtgatcagtgcgctgccgcatcaggtctctggcgccaaagtgctggagcagattgcggcgcagatgcgc

SEQ ID NO: 1783 - DNA, 706 bp, Klebsiella pneumoniae subsp. pneumoniae
  ref <308>: DATABASE ACCESSION NUMBER: ATCC 29011
ggcttaaaaccggtccagcgtcgcatcgtctatgcgatgtccgagctggggctgaacgccagcgcgaaattcaaaaagtccgcccgcaccgtcggcgacgtgttgggtaaatatcacccgcacggcgacagcgcctgctatgaagcgatggtgctgatggcgcagccgttctcttaccgctatccgctggtggatggtcagggaaactggggggcgccggacgatcccaaatcttttgccgccatgcgttacaccgaatcccgcctgtcgaagtatgccgagctgctgctcagcgagctggggcaggggacggtcgactgggtgccaaactttgacggcacgctgcaggagccgaaaatgctgccagcgcgtctgccgaacatcctgctgaacggcaccaccggcatcgcggtaggcatggcgaccgatattcctccgcacaacctgcgggaagtggccaaagcggcgattacgctgattgagcagccgaaaaccaccctcgacgaactgctggatatcgtacaggggccggatttcccgaccgaggcggagatcatcacctcgcgggcggaaattcgcaaaatctaccagaacgggcgcggctcagtgcgcatgcgcgcggtgtggagtaaagaggacggcgcggtggtgatcagtgcgctgccgcatcaggtctccggcgccaaagtgctggagcagattgcgg

SEQ ID NO: 1784 - DNA, 614 bp, Klebsiella pneumoniae subsp. rhinoscleromatis
  ref <308>: DATABASE ACCESSION NUMBER: ATCC 13884
ttggcgatggcttaaaaccggtccagcgtcgcatcgtctatgcgatgtccgagctggggctgaacgccagcgcgaaattcaaaaagtccgcccgcaccgtcggcgacgtgttgggtaaatatcacccgcacggcgacagcgcctgctatgaagcgatggtgctgatggcgcagccgttctcttaccgctatccgctggtggatggtcagggaaactggggggcgccggacgatcccaaatctttcgccgccatgcgttacaccgaatcccgcctgtcgaagtatgccgagctgctgctcagcgagctggggcaggggacggtcgactgggtgccaaactttgacggcacgctgcaggagccgaaaatgctgccagcgcgtctgccgaacatcctgctgaacggcaccaccggcatcgcggtaggcatggcgaccgatattcctccgcacaacctgcgggaagtggccaaagcggcgattacgctgattgagcagccgaaaaccaccctcgacgaactgctggatatcgtacaggggccggatttcccgaccgaggcggagatcatcacctcgcgggcggaaattcgcaaaatctaccagaacgggcgcggctca

SEQ ID NO: 1785 - DNA, 668 bp, Klebsiella terrigena
  ref <308>: DATABASE ACCESSION NUMBER: ATCC 33257
gcctgaaaccggtccagcggcgcatcgtttatgcgatgtccgaactgggtctgaacgccaccgctaaattcaaaaaatccgcgcgcaccgtcggcgacgtgctgggtaaatatcacccgcacggcgatagcgcctgctatgaggcgatggtgctgatggcgcagccgttctcttaccgctacccgctggtggacggtcagggcaactggggcgccccggacgatcccaaatccttcgccgcgatgcgttataccgaatcccgcctgtcaaagtatgcggagctgctgctgggcgagctgggtcagggaaccgttgactgggtacctaactttgacggtacgatgcaggagccgaaaatgctgcctgcgcgtttgccgaatattctgctcaacggcaccaccggtatcgccgtggggatggccaccgatattccgccgcacaacctgcgcgaagtggccaaagcggccatcaccctgattgaaaagccgcagacctcgctcgacgaactgctggatatcgttcacgggccggactaccccaccgaagctgaaatcatcaccccgcgcgccgagatccgcaaaatctatcagaacggtcgcggctcggttcgcatgcgtgcggtgtggaaaaaagaggacggcgcggtggtgattagcgccctgccgcat

SEQ ID NO: 1786 - DNA, 113 bp, Bacillus cereus
  ref <308>: DATABASE ACCESSION NUMBER: ATCC 7064
cattacgttctaacactcaaggacgcggaacattctctatggtgtttgaccactatgaagaagtaccaaagtctgtttctgaagaaattatcaaaaaaaataaaggtgaataa

SEQ ID NO: 1787 - DNA, 118 bp, Bacillus cereus
  ref <308>: DATABASE ACCESSION NUMBER: ATCC 14579
aacgtcattacgttctaacactcaaggacgcggaacattctctatggtgtttgaccactatgaagaagtaccaaagtctgtttctgaagaaattatcaaaaaaaataaaggtgaataa

SEQ ID NO: 1788 - DNA, 120 bp, Bacillus anthracis
  strain CIP 9444
gcaacgtcattacgttctaacactcaaggacgcggaacattctctatggtgtttgaccactatgaagaagtaccaaagtctgtttctgaagaaattatcaaaaaaaataaaggtgaataa

SEQ ID NO: 1789 - DNA, 118 bp, Bacillus cereus; identical to SEQ ID NO: 1787
  ref <308>: DATABASE ACCESSION NUMBER: ATCC 13472

SEQ ID NO: 1790 - DNA, 120 bp, Bacillus anthracis; identical to SEQ ID NO: 1788
  ref <308>: DATABASE ACCESSION NUMBER: ATCC 4229

SEQ ID NO: 1791 - DNA, 120 bp, Bacillus pseudomycoides
  NRRL B-617
gcaacgtcattacgttctaacacgcaaggacgcggaacattctcaatgacatttgatcattatgaagaagtaccgaagtctgtttcagaagaaattatcaaaaaaaataaaggtgaataa

SEQ ID NO: 1792 - DNA, 116 bp, Bacillus cereus
  ref <308>: DATABASE ACCESSION NUMBER: ATCC 49064
cgtcattacgttctaacactcaaggacgcggaacattctctatggtgtttgaccactatgaagaagtaccaaagtctgtttctgaagaaattatcaaaaaaaataaaggtgaataa

SEQ ID NO: 1793 - DNA, 120 bp, Bacillus anthracis; identical to SEQ ID NO: 1788
  strain CIP 9440

SEQ ID NO: 1794 - DNA, 100 bp, Bacillus cereus
  ref <308>: DATABASE ACCESSION NUMBER: ATCC 15816
cactcaaggacgcggaacattctctatggtgtttgatcactatgaagaagtaccaaagtctgtttctgaagaaattatcaaaaaaaataaaggtgaataa

SEQ ID NO: 1795 - DNA, 120 bp, Bacillus weihenstephanensis
  strain WSBC 10204
gcaacggcattacgttctaacactcaaggacgcggaacattctcaatgacatttgatcattatgaagaagtaccgaagtctgtttctgaagaaattattaaaaaaaataaaggtgaataa

SEQ ID NO: 1796 - DNA, 120 bp, Bacillus mycoides
  ref <308>: DATABASE ACCESSION NUMBER: ATCC 6462
gcgacagcattacgttctaacactcaaggacgcggaacattctcaatgacatttgatcattatgaagaagtaccgaagtctgtttcagaagaaattattaaaaaaaataaaggcgaataa

SEQ ID NO: 1797 - DNA, 120 bp, Bacillus thuringiensis; identical to SEQ ID NO: 1788
  ref <308>: DATABASE ACCESSION NUMBER: ATCC 10792

SEQ ID NO: 1798 - DNA, 117 bp, Bacillus weihenstephanensis
  strain WSBC 10204
ttgatttttatcgattgttcaagtataactacttatgtaagcttagaaagtgagacgcaagtttcactttctagtctaaatataaaataacccatataaactaaggaggaatttaga

SEQ ID NO: 1799 - DNA, 117 bp, Bacillus thuringiensis
  ref <308>: DATABASE ACCESSION NUMBER: ATCC 10792
ttgatttttatcgattgttcaagtataactacttatgtaagcttagaaagtgggacgtaagtttcactttctagtctaaatataaaataacctatataaactaaggaggaatttaga

SEQ ID NO: 1800 - DNA, 117 bp, Bacillus anthracis
  ref <308>: DATABASE ACCESSION NUMBER: ATCC 4229
ttgatttttatcgattcttcacgtataactacttatgtaagcttagaaagtgggacgcaagtttcgctttctagcctaaatataaaataacctatataaactaaggaggaatttaga

SEQ ID NO: 1801 - DNA, 117 bp, Bacillus pseudomycoides
  NRRL B-617
ttgatttttatcgattgttcaagtataactacttatgtaagcttagaaagtgggacttaagtttcactttctagtctaaatataaaataacctatataaactaaggaggaatttaga

SEQ ID NO: 1802 - DNA, 117 bp, Bacillus anthracis; identical to SEQ ID NO: 1800
  strain CIP 9444

SEQ ID NO: 1803 - DNA, 117 bp, Bacillus cereus
  ref <308>: DATABASE ACCESSION NUMBER: ATCC 7064
ttgatttttatcgattcttcacgtataactacttatgtaagcttagaaagtgagacgcaagtttcgctttctagcctaaatataaaataacctatataaactaaggaggaatttaga

SEQ ID NO: 1804 - DNA, 117 bp, Bacillus cereus
  ref <308>: DATABASE ACCESSION NUMBER: ATCC 49064
ttgatttttatcgattcttcacgtataactacttatgtaagcttagaaagtgggacgcaagtttcactttctagcctaaatataaaataacctatataaactaaggaggaatttaga

SEQ ID NO: 1805 - DNA, 117 bp, Bacillus mycoides
  ref <308>: DATABASE ACCESSION NUMBER: ATCC 6462
ttgatttttatcaattgttcgagtataactacttatgtaagcttagaaagtgggacgtaagtttcgctttctagtctaaatataaaataacctatataaactaaggaggaatttaga

SEQ ID NO: 1806 - DNA, 117 bp, Bacillus cereus; identical to SEQ ID NO: 1799
  ref <308>: DATABASE ACCESSION NUMBER: ATCC 14579

SEQ ID NO: 1807 - DNA, 117 bp, Bacillus cereus; identical to SEQ ID NO: 1800
  ref <308>: DATABASE ACCESSION NUMBER: ATCC 15816

SEQ ID NO: 1808 - DNA, 117 bp, Bacillus cereus; identical to SEQ ID NO: 1799
  ref <308>: DATABASE ACCESSION NUMBER: ATCC 13472

SEQ ID NO: 1809 - DNA, 116 bp, Bacillus anthracis
  strain CIP 9440
ttgatttttatcgattcttcacgtataactacttatgtaagcttagaaagtgggacgcaagtttcgctttctagcctaaatataaaataacctatataaactaaggaggaatttag

SEQ ID NO: 1810 - DNA, 278 bp, Bacillus mycoides
  ref <308>: DATABASE ACCESSION NUMBER: ATCC 6462
atggctaaagctaaattcgaacgttctaaaccccatgttaacatcggtacaatcggccacgttgaccatggtaaaactacattaactgctgcgatcactacagttcttgcaaaagctggtggtgctgaagcacgcggatacgatcaaatcgacgctgctccagaagaaagagagcgcggaatcacaatctcaactgcacacgttgagtacgaaactgaaactcgtcactatgcacacgttgactgcccaggtcacgctgactatgttaaaaacatgat

SEQ ID NO: 1811 - DNA, 278 bp, Bacillus thuringiensis
  ref <308>: DATABASE ACCESSION NUMBER: ATCC 10792
atggctaaagctaaattcgaacgttctaaaccccatgttaacatcggtacaatcggccacgttgaccatggtaaaactacattaactgctgcgatcactacagttcttgcaaaagctggtggtgctgaagcacgcggatacgatcaaatcgatgctgctccagaagaaagagagcgcggtatcacaatctcaactgcacacgttgagtacgaaactgaaactcgtcactatgcacacgttgactgcccaggtcacgctgactatgttaaaaacatgat

SEQ ID NO: 1812 - DNA, 270 bp, Bacillus cereus
  ref <308>: DATABASE ACCESSION NUMBER: ATCC 15816
atggctaaagctaaattcgaacgttctaaaccccatgttaacatcggtacaatcggccacgttgaccatggtaaaactacattaactgctgcgatcactacagtacttgcaaaagctggtggtgctgaagcacgcggatacgatcaaatcgatgctgctccagaagaaagagagcgcggtatcacaatctcaactgcacacgttgagtacgaaactgaaactcgtcactatgcacacgttgactgcccaggtcacgctgactatgttaaa

SEQ ID NO: 1813 - DNA, 278 bp, Bacillus weihenstephanensis
  strain WSBC 10204
atggctaaagctaaattcgaacgttctaaaccccatgttaacatcggtacaatcggccacgttgaccatggtaaaactacattaactgctgcgatcactacagttcttgcaaaagctggtggtgctgaagcacgcggatacgatcaaatcgacgctgctccagaagaaagagagcgcggaatcacaatctcaactgcacacgttgagtacgaaactgaaactcgtcactatgcacacgttgactgcccaggtcatgctgactatgttaaaaacatgat

SEQ ID NO: 1814 - DNA, 266 bp, Bacillus anthracis
  strain CIP 9440
atggctaaagctaaattcgaacgttctaaaccccatgttaacatcggtacaatcggccacgttgaccatggtaaaactacattaactgctgcgatcactacagtacttgcaaaagctggtggtgctgaagcacgcggatacgatcaaatcgatgctgctccagaagaaagagagcgcggtatcacaatctcaactgcacacgttgagtacgaaactgaaactcgtcactatgcacacgttgactgcccaggtcacgctgactatgt

SEQ ID NO: 1815 - DNA, 269 bp, Bacillus cereus
  ref <308>: DATABASE ACCESSION NUMBER: ATCC 7064
atggctaaagctaaattcgaacgttctaaaccccatgttaacatcggtacaatcggccacgttgaccatggtaaaactacattaactgctgcgatcactacagtacttgcaaaagctggtggtgctgaagcacgcggatacgatcaaatcgatgctgctccagaagaaagagagcgcggtatcacaatctcaactgcacacgttgagtacgaaactgaaactcgtcactatgcacacgttgactgcccaggtcacgctgactatgttaa

SEQ ID NO: 1816 - DNA, 268 bp, Bacillus cereus
  ref <308>: DATABASE ACCESSION NUMBER: ATCC 13472
atggctaaagctaaattcgaacgttctaaaccccatgttaacatcggtacaatcggccacgttgaccatggtaaaactacattaactgctgcgatcactacagttcttgcaaaagctggtggtgctgaagcacgcggatacgatcaaatcgatgctgctccagaagaaagagagcgcggtatcacaatctcaactgcacacgttgagtacgaaactgaaactcgtcactatgcacacgttgactgcccaggtcacgctgactatgtta

SEQ ID NO: 1817 - DNA, 278 bp, Bacillus anthracis
  ref <308>: DATABASE ACCESSION NUMBER: ATCC 4229
atggctaaagctaaattcgaacgttctaaaccccatgttaacatcggtacaatcggccacgttgaccatggtaaaactacattaactgctgcgatcactacagtacttgcaaaagctggtggtgctgaagcacgcggatacgatcaaatcgatgctgctccagaagaaagagagcgcggtatcacaatctcaactgcacacgttgagtacgaaactgaaactcgtcactatgcacacgttgactgcccaggtcacgctgactatgttaaaaacatgat

SEQ ID NO: 1818 - DNA, 268 bp, Bacillus cereus; identical to SEQ ID NO: 1816
  ref <308>: DATABASE ACCESSION NUMBER: ATCC 14579

SEQ ID NO: 1819 - DNA, 278 bp, Bacillus anthracis; identical to SEQ ID NO: 1817
  strain CIP 9444

SEQ ID NO: 1820 - DNA, 278 bp, Bacillus pseudomycoides
  NRRL B-617
atggctaaagctaaattcgaacgttctaaaccccatgttaacatcggtacaatcggccacgttgaccatggtaaaactacattaactgctgcgatcactacagttcttgcaaaagctggtggtgctgaagcacgcggatacgaccaaatcgatgctgctccagaagaaagagagcgcggtatcacaatctcaactgcacacgttgagtacgaaactgaaactcgtcactatgcacacgttgactgcccaggtcacgctgactatgttaaaaacatgat

SEQ ID NO: 1821 - DNA, 263 bp, Bacillus cereus
  ref <308>: DATABASE ACCESSION NUMBER: ATCC 49064
atggctaaagctaaattcgaacgttctaaaccccatgttaacatcggtacaatcggccacgttgaccatggtaaaactacattaactgctgcgatcactacagtacttgcaaaagctggtggtgctgaagcacgcggatacgatcaaatcgatgctgctccagaagaaagagagcgcggtatcacaatctcaactgcacacgttgagtacgaaactgaaactcgtcactatgcacacgttgactgcccaggtcacgctgacta

SEQ ID NO: 1822 - DNA, 1668 bp, Streptococcus oralis
  ref <308>: DATABASE ACCESSION NUMBER: ATCC 35037
caatcgaagtacaacgttctcttcgwgtattggacggtgcggttactgttcttgactcacaatcaggtgttgagcctcaaactgaaacagtttggcgtcaagcaactgagtacggagttccacgtatcgtatttgctaacaaaatggacaaaatcggtgctgacttcctttactcagtaagcacacttcacgaccgtcttcaagcaaacgcacacccaatccaattgccaatcggtgctgaagatgacttccgtggtatcatcgacttgatcaagatgaaagctgaaatctatactaacgaccttggtacagatatccttgaagaagatattccagctgaataccttgaccaagctcaagaataccgtgaaaaattggttgaagcagtcgctgaaactgatgaagacttgatgatgaaataccttgaaggtgaagaaatcactaacgaagaattgaaagctgctatccgtaaagcaactatcaacgttgaattcttcccagtattgtgtggttctgccttcaagaacaagggtgttcaattgatgcttgatgcggttatcgactaccttccaagcccacttgatatcccagcgatcaaaggtatcaacccagatwcagatgaagaagaaactcgtccagcatctgacgaagagccattcgcagctcttgccttcaagatcatgacggacccatttgtaggtcgtttgacattcttccgtgtatactcargtgttctccaatcargktcttacgtattgaacacatctaaaggtaaacgtgaacgtatcggacgtatccttcaaatgcacgctaacagccgtcaagaaattgacactgtttactcaggtgatatcgctgctgccgttggtttgaaagatactycaactggtgactcattgmcagatgaaaaagctaaaatcatccttgagtcaatcaacgttccagamccagttatccaattgatggttgagccaaaatctaaagctgaccaagataagatgggtatcgcccttcaaaaattggctgaagaagatccaacattccgcgttgaamcaaacgttgaaactggtgaamcagttatctcaggtatgggtgagcttcacttggacgtccttgttgaccgtatgcgtcgtgagttcaaagtggaagcgaacgtaggtgctcctcaagtatcttaccgtgaaacattccgcgcttctactcaagcacgtggattcttcaaacgtcagtctggtggtaaaggtcaattcggtgatgtatggattgaatttactccaaacgaagaaggtaaaggattcgaattcgaaaacgcaatcgtcggtggtgtggttcctcgtgaatttatcccagcggttgaaaaaggtttggtagaatctatggctaacggtgttcttgcaggttacccaatggttgacgttaaagctaagctttacgatggttcataccacgatgtcgactcatctgaaactgccttcaagatcgcggcttcacttgcccttaaagaagctgctaagtcagcacaaccagctatccttgagccaatgatgcttgtaaccatcactgttccagaagaaaaccttggtgatgttatgggtcacgtaactgctcgtcgtggacgtgtagatggtatggaagcacwcggtaacagccaaatcgttcgtgcttacg

SEQ ID NO: 1823 - DNA, 115 bp, Budvicia aquatica
  ref <308>: DATABASE ACCESSION NUMBER: ATCC 35567
agacctgcgttcacaaacacagggtcgtgcttcttactctatggagttcttgaagtacaacgaagcgccaaacaacgttgctacagcaatcattgaagctcgtaaggctagataa

SEQ ID NO: 1824 - DNA, 107 bp, Buttiauxella agrestis
  ref <308>: DATABASE ACCESSION NUMBER: ATCC 33320
ctgcgttcactgaccaaggtcgtgcatcttactccatggaattcctgaagtatgatgacgcgccaaacaacgtagctcaggccgtaatcgaagctcgcggtaaataa

SEQ ID NO: 1825 - DNA, 79 bp, Klebsiella oxytoca
  ref <308>: DATABASE ACCESSION NUMBER: ATCC 13182
ttactccatggagttcctgaagtatgatgatgcgccgaacaacgttgctcaggccgtaatcgaagcccgtggtaaataa

SEQ ID NO: 1826 - DNA, 111 bp, Plesiomonas shigelloides
  ref <308>: DATABASE ACCESSION NUMBER: ATCC 14029
cagctgcgttctctgaccaaaggtcgtgcatcatacactatggaattcctgaagtatgatgatgcgccaaacaacgttgctcaggccgttattgaagcccgtggtaagtaa

SEQ ID NO: 1827 - DNA, 108 bp, Shewanella putrefaciens
  ref <308>: DATABASE ACCESSION NUMBER: ATCC 8071
gatttgcgctctgcaactcatgggcgtgcttcgtactccatggagttcttgaagtactctgatgcaccgcaaaacattgcgaaagcgattattgaatctcgtagctaa

SEQ ID NO: 1828 - DNA, 113 bp, Obesumbacterium proteus
  ref <308>: DATABASE ACCESSION NUMBER: ATCC 12841
ctcagctgcgttctctgaccaaaggtcgtgcatcttactccatggaattcctgaagtatgatgatgcgcctaacaacgttgctcaggccgttattgaagctcgtggcaaataa

SEQ ID NO: 1829 - DNA, 70 bp, Klebsiella oxytoca
  ref <308>: DATABASE ACCESSION NUMBER: ATCC 13182
gccgcagggttaaaaccaaagtcccgtgctctctcctgaaggggagagcactatagtaaggaatatagcc

SEQ ID NO: 1830 - DNA, 66 bp, Budvicia aquatica
  ref <308>: DATABASE ACCESSION NUMBER: ATCC 35567
gcctcgggtaaaacttatatcccagtccccctcgtatagagggggatagagtaaaggaagataatc

SEQ ID NO: 1831 - DNA, 81 bp, Plesiomonas shigelloides
  ref <308>: DATABASE ACCESSION NUMBER: ATCC 14029
tccacaggattaaaacccaggtttaaacctaagtcccgtgctctctcctcaggggagagcacaatagtaaggaatatagcc

SEQ ID NO: 1832 - DNA, 70 bp, Obesumbacterium proteus
  ref <308>: DATABASE ACCESSION NUMBER: ATCC 12841
gctactagtttaaaacattgatcccgtgctctctctatgaagggagagcacaagagtaaggaataaagcc

SEQ ID NO: 1833 - DNA, 72 bp, Shewanella putrefaciens
  ref <308>: DATABASE ACCESSION NUMBER: ATCC 8071
tttccagttacgacataaatgttattatggtccagctttgactggactattctgaaaagaaaggaatatatc

SEQ ID NO: 1834 - DNA, 73 bp, Buttiauxella agrestis
  ref <308>: DATABASE ACCESSION NUMBER: ATCC 33320
gccccgggttttaaaaaacattgatcccgtgctctctccagaaggggagagcgcaacagtaaggaatatagcc

SEQ ID NO: 1835 - DNA, 795 bp, Campylobacter coli
  ref <308>: DATABASE ACCESSION NUMBER: ATCC 43479
ctgcagctgatggtcctatgccacaaactagagagcacatccttctatcacgccaagtaggtgttccatatatcgttgtatttatgaataaagcagatatggttgatgatgctgaacttttagaattggttgaaatggaaattagagaattattaagctcttatgatttcccaggtgatgacacacctattatttcaggttctgctttaaaagctcttgaagaagcaaaagctggacaagatggcgaatggtcagcgaaaattatggatcttatggctgctgttgatagctatattccaactccaactcgtgacactgaaaaagatttcttaatgccaattgaagatgttttctcaatttcaggtcgtggtactgttgttacaggtagaattgaaaaaggtattgtaaaagttggtgatactatagaaatcgttggtattaaagatactcaaacaacaactgtaactggcgttgaaatgtttagaaaagaaatggaccaaggtgaagcaggggataatgttggtgttcttcttcgtggtacaaaaaaagaagaagttatccgcggtatggttcttgctaaaccaaaatcaattactccacatactgatttcgaagctgaagtttatatcctaaataaagatgagggtggtagacatactccattctttaataactatagaccgcaattctatgtaagaacaacagatgtaacaggttctattaaattagctgatggcgttgaaatggttatgcctggtgaaaatgtaagaattactgtaagcttgattgcaccag

SEQ ID NO: 1836 - DNA, 817 bp, Campylobacter fetus subsp. fetus
  ref <308>: DATABASE ACCESSION NUMBER: ATCC 25936
gccatactagttgtttctgcagctgatggcccaatgccacaaactagagagcacattttgctatctcgtcaagttggtgttccatatatagttgtttttatgaacaaagctgatatggtagatgacgcagagttgctagaattagttgaaatggagatcagagagttattaagcgaatatgacttccctggtgatgatactcctattataagcggatcagcacttcaagctcttgaagaagctaaagctggtaatgatggcgaatggtcagctaagattatggatcttatggctgctgttgatagctacataccaactccagttcgtgctactgataaagatttcttaatgccgattgaagacgtattctcaatttctggccgtggtactgttgttactggtagaattgaaaaaggtatagttaaagttggtgatactatcgaaatcgtaggtattagagatacacaaactacaacagttaccggcgttgaaatgtttagaaaagaaatggatcaaggcgaggctggtgataacgttggtgttcttttacgcggtacaaagaaagaagacgttgaaagaggtatggttctttgtaagccaaaatcaattactcctcatactaaatttgagggagaagtttatatcttgactaaggaagagggcggtagacatactccattcttcaacaactatagaccacaattttatgtaagaacaacagatgttactggatcaatcactcttccagagggtactgagatggttatgcctggtgataacttaaaaatcactgttgagttaatcaacccagttgctc

SEQ ID NO: 1837 - DNA, 798 bp, Campylobacter fetus subsp. venerealis
  ref <308>: DATABASE ACCESSION NUMBER: ATCC 33561
ccatactagttgtttctgcagctgatggcccaatgccacaaactagagagcacattttgctatctcgtcaagttggtgttccatatatagttgtttttatgaacaaagctgatatggtagatgacgcagagttgctagaattagttgaaatggagatcagagagttattaagcgaatatgacttccctggtgatgatactcctattataagcggatcagcacttcaagctcttgaagaagctaaagctggtaatgatggcgaatggtcagctaagattatggatcttatggctgctgttgatagctacataccaactccagttcgtgctactgataaagatttcttaatgccgattgaagacgtattctcgatttctggccgtggtactgttgttactggtagaattgaaaaaggtatagttaaagttggtgatactatcgaaatcgtaggtattagagatacacaaactacaacagttaccggcgttgaaatgtttagaaaagaaatggatcaaggcgaggctggtgataacgttggtgttcttttacgcggtacaaagaaagaagacgttgaaagaggtatggttctttgtaagccaaaatcaattactcctcatactaaatttgagggagaagtttatatcttgactaaggaagagggcggtagacatactccattcttcaacaactatagaccacaattttatgtaagaacaacagatgttactggatcaatcactcttccagagggtactgagatggttatgcctggtgataacttaaaaatcactgttagtt

SEQ ID NO: 1838 - DNA, 1116 bp, Buttiauxella agrestis
  ref <308>: DATABASE ACCESSION NUMBER: ATCC 33320
gtgtctaaagaaaaatttgaacgtacaaaaccgcacgtcaacgtcggtactatcggccacgttgaccatggtaaaactactctgactgcagcaatcactaccgttctggctaaaacctacggcggttctgcacgcgcattcgaccagatcgataacgcaccagaagaaaaagctcgtggtatcaccatcaacacttcccacgttgaatatgacaccccgactcgtcactacgcgcacgttgactgcccagggcacgccgactacgttaaaaacatgatcaccggtgctgctcagatggacggcgctatcctggttgttgctgcgactgatggcccgatgccacagactcgtgagcacatcctgctgggtcgccaggttggcgttccattcatgatcgtgttcatgaacaaatgtgacatggttgatgacgaagagctgctggaactggtagaaatggaagttcgtgaacttctgtctgcttatgatttcccgggcgacgacatcccagtggttcgtggttcagctctgaaagcgctggaaggcgaagcagagtgggaagctaaaatcatcgagctggctggtcacctggataactacatcccagaaccagagcgtgctatcgacaagccattcctgctgccaatcgaagacgtattctccatctccggccgtggtactgttgttactggtcgtgtagagcgtggtatcattaaagttggtgaagaagtagaaatcgttggtatcaaagataccgtgaaatctacctgtactggcgttgaaatgttccgcaaactgctggacgaaggccgtgctggtgagaacgttggtgttctgctgcgtggtattaaacgtgaagatatcgaacgtggtcaggttctggctaagccaggctctatcaagccgcacactcagttcgaatcagaagtttatatcctgtccaaagatgaaggcggccgtcatactccgttcttcaaaggctaccgtccacagttctacttccgtacaactgacgtgactggcaccatcgaactgccagaaggcgttgagatggtaatgccgggcgacaacattcaaatggttgttaccctgatccacccaatcgcaatggacgacggt

SEQ ID NO: 1839 - DNA, 1109 bp, Klebsiella oxytoca
  ref <308>: DATABASE ACCESSION NUMBER: ATCC 13182
gtgtctaaagaaaaatttgaacgtacaaaaccgcacgtcaacgtcggtactatcggccacgttgaccatggtaaaactactctgaccgctgcaatcactaccgttctggctaaaacctacggtggtgctgctcgcgcattcgaccagatcgataacgcgccggaagaaaaagctcgtggtatcaccatcaacacttcccacgttgaatatgacaccccgactcgccactacgcgcacgtagactgcccgggccacgccgactatgttaaaaacatgatcaccggtgctgcgcagatggacggcgcgatcctggttgttgctgcgactgacggcccgatgccgcagactcgtgagcacatcctgctgggtcgtcaggtaggcgttccgtacatcatcgtgttcctgaacaagtgcgacatggttgatgacgaagagctgctggaactggttgaaatggaagttcgtgaacttctgtctcagtacgatttcccgggcgacgacactccgatcgttcgtggttctgctctgaaagctctggaaggcgacgctgagtgggaatctaaaatcatcgaactggctggcttcctggattcttatattccggaaccagagcgtgcgattgacaagccgttcctgctgccgatcgaagacgtattctccatctccggtcgtggtaccgttgttaccggtcgtgtagagcgcggtatcatcaaagttggcgaagaagttgaaatcgttggtatcaaagacactgctaagtctacctgtactggcgttgaaatgttccgcaaactgctggacgaaggccgtgctggtgagaacgttggtgttctgctgcgtggtatcaaacgtgaagaaatcgaacgtggtcaggtactggctaagccgggctctatcaagccgcacaccaagttcgaatctgaagtttatatcctgtccaaagacgaaggcggccgtcacactccgttcttcaaaggctaccgtccgcagttctacttccgtacaactgacgtgactggcaccatcgaactgccggaaggcgtagagatggttatgccgggcgacaacatcaaaatggttgttaccctgatccacccgatcgcgatgga

SEQ ID NO: 1840 - DNA, 1108 bp, Plesiomonas shigelloides
  ref <308>: DATABASE ACCESSION NUMBER: ATCC 14029
gtgtctaaagaaaaatttgaacgtactaaaccgcacgttaacgttggtactatcggccacgttgaccacggtaaaactaccctgactgcagctatcactaccgtactgtctaaagtatacggtggtcaggctcgtgcattcgatcagatcgataacgcgccagaagaaaaagctcgtggtatcaccatcaacacttctcacgtagagtacgacaccccaactcgtcactacgcgcacgttgactgcccaggtcacgccgactacgtgaagaacatgatcactggtgctgctcagatggacggcgctatcctggtagtagctgcgactgacggcccaatgcctcagactcgtgagcacatcctgctgggtcgtcaggtaggcgttccttacatcatcgtgttcctgaacaagtgtgacatggttgatgacgaagagctgctggaactggtagaaatggaagtacgtgagctgctgtctcagtacgacttcccaggcgacgatactccagttgttcgcggttctgcactgaaagcgctggaaggcgatgctcagtgggaagagaagattgttgaactggcaggctacctggacagctacatccctgagccagagcgtgctatcgacaagccattcctgctgccaatcgaagacgtattctctatctccggccgtggtactgtagtaactggtcgtgtagagcgcggtatcatcaaagttggtgaagaagtagaaatcgttggtatcaaagagactaccaagactacttgtactggcgttgaaatgttccgtaagctgctggacgaaggtcgtgcgggcgagaacgtaggtgttctgctgcgtggtaccaagcgtgatgacgtagagcgtggtcaggttctggctaagccaggctcaatcaacccacacaccaactttgtagcagaagtttatattctgtccaaagatgaaggtggtcgtcacactccattcttcaaaggctaccgtccacagttctacttccgtacaactgacgtgaccggtaccatcgaactgccagaaggcgtagagatggtaatgccaggtgacaacattcaaatggttgttaccctgattgcaccaatcgcgatgg

SEQ ID NO: 1841 - DNA, 1107 bp, Shewanella putrefaciens
  ref <308>: DATABASE ACCESSION NUMBER: ATCC 8071
tggcaaaagctaaatttgaacgtattaagcctcacgtaaacgtgggcaccattggtcacgttgaccatggtaaaaccactctgactgcagctatctctcacgtactggctaagacctacggtggcgaagctaaagacttctctcaaatcgataacgctccagaagagcgtgagcgcggtattaccatcaatacctctcacatcgaatatgacacgccatcacgccactacgcccacgtagactgcccaggccacgctgactatgttaaaaacatgatcactggtgctgcacagatggacggcgcgattctggtagtcgcttcaacagacggtccaatgccacagactcgtgagcacatcctgctttctcgtcaggttggcgtaccattcatcatcgtattcatgaacaaatgtgacatggtagatgacgaagagctgttagagctagttgagatggaagtgcgtgaactgttatcagaatacgatttcccaggtgatgacttaccggtaatccaaggttcagctctgaaagcgctagaaggcgagccagagtgggaagcaaaaatccttgaattagcagcggcgctggattcttacattccagaaccacaacgtgacatcgataagccgttcctactgccaatcgaagacgtattctcaatttcaggccgtggtacagtagtaacaggtcgtgttgagcgtggtattgtacgcgtaggcgacgaagttgaaatcgttggtgtacgtgcgacaactaagacaacgtgtactggtgtagaaatgttccgtaaactgcttgacgaaggtcgtgcaggtgagaactgtggtattttgttacgtggtactaagcgtgatgacgtagaacgtggtcaagtattagcgaagccaggttcaatcaacccacacactacttttgaatcagaagtttacgtactgtcaaaagaagaaggtggtcgtcacacgccattcttcaaaggctaccgtccacagttctacttccgtacaactgacgtaaccggtactatcgaactgccagaaggcgtagagatggtaatgccaggcgataacatcaagatggtagtgacactgatttgcccaatcgcgatgg

SEQ ID NO: 1842 - DNA, 1116 bp, Obesumbacterium proteus
  ref <308>: DATABASE ACCESSION NUMBER: ATCC 12841
gtgtctaaagaaaaatttgaacgtacaaaaccgcacgttaacgttggtacaatcggccacgttgaccacggtaaaactaccctgactgctgcaatcactaccgttctggctaaaacctacggtggttctgcacgtgcattcgaccagatcgataacgcgccagaagaaaaagctcgtggtatcaccatcaacacttctcacgttgaatatgacaccccgactcgccactacgcacacgtagactgcccaggccacgccgactatgttaaaaacatgatcaccggtgctgcgcagatggacggcgcgatcctggttgttgctgcgactgacggccctatgcctcagactcgtgagcacatcctgctgggtcgtcaggttggcgttccttacatcatcgtattcctgaacaaatgcgacatggttgatgatgaagagctgctggagctggtagaaatggaagttcgtgaacttctgtctcagtacgacttcccaggcaatgatactccaatcatccgtggttctgctctgaaagcgctggaaggcgaagctgagtgggaagctaagatcgtagaactggctgaaactctggattcttacatcccagaaccagaacgtgctatcgacaagccattcctgctgccaatcgaagacgtattctcaatctctggccgtggtactgttgttaccggtcgtgtagagcgcggtatcgttaaagttggtgaagaagttgagattgttggtatcaaagataccgttaaatcaacttgtaccggcgttgaaatgttccgtaaactgctggacgaaggtcgtgcaggcgagaacgttggtgttctgctgcgtggtatcaagcgtgaagacatcgaacgtggtcaggttctggctaaaccaggttctatcaaaccacacaccaagttcgaatcagaagtttatattctgagcaaagatgaaggcggccgtcatactccgttcttcaaaggctaccgtccacagttctacttccgtacaactgacgtgaccggtaccatcgaactgccagaaggcgtggaaatggtaatgccaggcgataacatcaaaatgatcgttaccctgatccacccaatcgcaatggacgatggt

SEQ ID NO: 1843 - DNA, 1129 bp, Budvicia aquatica
  ref <308>: DATABASE ACCESSION NUMBER: ATCC 35567
gtgtctaaagaaaaatttgaacgtacaaaaccgcacgttaacgttggtactatcggccacgttgaccacggtaaaacaactctgactgctgctatcaccagcgttttagctaaaacttatggcggtaacgctcgtgcattcgatcaaatcgataatgcaccagaagaaaaagcacgtggtatcaccatcaacacttctcacgttgagtatgatactcctgctcgccactacgcacacgtagactgcccaggacacgccgactatgtgaaaaacatgatcaccggtgctgctcaaatggacggcgcgatcttagttgttgcggcaactgatggtcctatgccacagactcgtgagcacatcctgttaggtcgtcaggttggcgttccttacatcatcgtgttcctgaacaagtgtgacatggttgatgacgaagaactgttagaattagttgaaatggaagttcgtgagcttctttctgcttatgatttccctggtgacgatactccagttgttcgtggttctgcgctgaaagcgttagaaggcgaagctgagtgggaagctaagatcattgaattagccggatatctggatagctacatcccagagccagagcgtgcgattgaccgtccgttcctgctgccaatcgaagacgtattctctatttcaggccgtggtacagttgttaccggtcgtgtagagcgcggaatcgttaaagtcggtgaagccgttgagattgttggtatcaaagataccgtacaaactacctgtactggcgttgaaatgttccgtaagttacttgacgaaggccgtgctggtgagaacgttggtgttctgctgcgtggtactaagcgtgaagaaatcgaacgcggtcaagtactggctaagccaggttcaatcaacccgcacaccaactttgtatcagaagtttatattctgagcaaagatgaaggtggtcgtcatactccattcttcaaaggctaccgtccacagttctacttccgtacaactgacgtgaccggtactatcgaactgccagaaggcgtagagatggtgatgcctggtgacaacattcagatgactgtaactctgattgcaccaatcgcgatggacgaaggtttacgcttcgcta

SEQ ID NO: 1844 - DNA, 810 bp, Abiotrophia adiacens
  ref <308>: DATABASE ACCESSION NUMBER: ATCC 49175
atattcataatgcattacaagttgtgaaaacaacaagtgacggaagtgaaaagactgttacattggaaactgctgtagaattaggggatggtgcagttcgtacgattgccatggaatctacagatggtttgcaacgtggcatgaaagtagtggacttaggacgcacaattagcgttcctgtgggacctgaaacattaggtcgtgtattcaacgttttaggagatacaatcgacttgaaagaaccattcccagaagactttacaagacatgaaatccataaaccagcaccaaaatttgaagaattaaacagtcaatatgaaattctacaaacagggattaaagttattgaccttttagcaccttatcttaaaggtggtaaaatcggtttattcggtggtgccggtgtagggaaaaccgtattaattcaagaattaattcataatatcgctgaagaacttggtggtatttcagtatttacaggggtaggggaacgtactcgtgaagggaatgacctttaccatgaaatgcaagaatcaggcgtatctgctaaaacagcgatggtgtttgggcaaatgaacgaaccaccaggagctcgtatgcgtgtagcactaacagggttaactattgcggaatacttccgtgatatggaaaaacaagacgtgcttttattcatcgataacatttatcgtttcacgcaagcaggttcagaagtgtcagcgttacttggtcgtatgccttctgccgtagggtatcaaccaacattagcgacagaaatgggtcaattacaagaacgtatcagttcaactaaag

SEQ ID NO: 1845 - DNA, 815 bp, Arcanobacterium haemolyticum
  ref <308>: DATABASE ACCESSION NUMBER: ATCC 9345
tgctctgccagaaattaacaacgccctcctcaccgaagtagacctctccggccaaggcgaaggcgaaagcgttctcaagatgactcttgaggttgctcagcacctcggcgataacatcgtccgtaccatcgccatgaagccaaccgacggtctggttcgcggcgccaccgttatcgataccggcgccccaatcaccgtgccagttggcgacgcaactaaaggtcatgttttcaacgtgaccggtgatgtcctaaacttgggcgaaggcgaaacccttgacgtcaaggaacggtggccaatccaccgcaaggctccacagttcgacgaactcgaaccggaaaccaagatgttcgaaacaggcatcaaggtgatcgatctcctcaccccatacgtacagggcggcaagatcggtctgtttggcggtgctggtgttggtaagaccgttcttatccaggaaatgatccagcgtgttgcacaggatcatggcggtgtgtccgtgttcgcgggtgtgggtgaacgtacccgtgaaggtaacgatcttatccacgaaatggaagatgcgggcgttcttgataagaccgcgcttgtgttcggccagatggatgaaccgccaggggttcgtttgcgtattgcactttccggcctgaccatggcggaatacttccgtgacgtgcaaaaccaggacgtgcttttgttcatcgataacatcttccgcttcacccaggcaggttcggaagtgtccacgttgcttggccgtatgccatcagcagtgggctaccagccgaccttggcagatkaaatgggcgcattgcagg

SEQ ID NO: 1846 - DNA, 1073 bp, Basidiobolus ranarum
  ref <308>: DATABASE ACCESSION NUMBER: ATCC 24670
accttcctcctatcttgaahgccctggaggtccaaaaccacagctctcgyttagttttagaggtgtcccagcatttgggtgaaaacaccgttcgtactattgctatggacggtactgaaggattggttcgtggtcaaaatgtcgtagataccggatatcctattagagttcctgtcggtcctgaatgtttgggtcgtatcatgaacgttattggcgagcctgttgatgagcgcggycctatcaagaccaagaagcttgcacccatccacgcttctccccccgagttcgtygaccaatccaccacccccgaaatcttggagactggtattaaggttgtcgatttgttggccccttacgctcgtggtggtaagatcggtcttttcggtggtgccggtgtcggtaagactgtgtttatccaggagttgatyaacaacgttgccaaggcccacggtggttactccgtgttcgctggtgttggtgagcgtactcgtgagggtaacgatttgtaccacgagatgattcaaactggtgtcatcaagcttgatggccaatccaaggctgcccttgtctacggmcaaatgaacgagcccccaggtgctcgtgcccgmgtcgctttgaccggtcttaccgttgctgaatacttccgtgatgaggaagghcaagatgtgttgctcttcattgacaacattttccgtttcacccaagctggttctgaagtgtcygccttgttgggtcgtatcccctccgctgtcggttaccaacccaccttggccaccgatatgggtgtcatgcaagagcgtattaccaccaccaagaagggttccattacctctgtccaggccatttacgtccctgctgatgatttgaccgatcccgctcctgccactacttttgcccatcttgacgccaccaccgtgttgtctcgttccatctctgagttgggtatttaccccgctgtcgatcccctcgactccaagtctcgtatgttggatccycgtattgtcggtgaagagcactacgacatcgccactggtgttcagaagattctccartcttacaagtctctccaggat

SEQ ID NO: 1847 - DNA, 480 bp, Blastomyces dermatitidis
  ref <308>: DATABASE ACCESSION NUMBER: ATCC 56220
tgtctttatccaggagttgattgtacgtcttgcctcaccctttgggtattttgcgaatactaattatagtagaacaacattgccaaggctcacggtggttactctgtcttcactggtgtcggtgaacgtactcgtgagggtaacgatttgtaccacgaaatgcaggaaactggtgtcattcagctcgagggtgaatccaaggtcgccctcgtgttcggtcagatgaacgagccccctggtgcccgtgcccgtgtcgctcttactggtttgaccattgccgagtacttccgtgacgaggagggtcaagatgtgcttctcttcattgacaacattttccgtttcactcaggccggttctgaggtgtctgcccttttgggtcgtatcccctctgccgtcggttaccagcccactctcgccgtcgacatgggtgtcatgcaggagcgtattaccaccaccaccaagggttccatcacctccgtc

SEQ ID NO: 1848 - DNA, 566 bp, Blastomyces dermatitidis
  ref <308>: DATABASE ACCESSION NUMBER: ATCC 14112
tgtcttcattcaggagttgattgtacgtcccttcctctctacaaatgacgggcgaggaaaatttttggctttttctaatagctcgttatagaacaacattgccaaagcccacggtggttactccgttttcactggtgtcggcgagcggacccgtgaaggaaacgatttgtaccacgagatgcaggaaacccgtgttatccagctcgatggcgagtctaaggtcgcactcgtcttcggtcagatgaacgagccccccggagcccgtgcccgtgttgccctcactggcctgaccattgctgaatatttccgtgacgaggaaggtcaagacggtatgtattcatataaattactccgggcaaattgactcagaaccgcactcactcacacatatattagtgcttctctttatcgacaacattttccgcttcacccaggccggttccgaagtgtccgccctgcttggtcgtattccctccgccgtcggttaccaacccactctcgccgtcgacatgggtggtatgcaggaacgtatcacaaccaccaccaagggctccattacctycgtg

SEQ ID NO: 1849 - DNA, 817 bp, Campylobacter coli
  ref <308>: DATABASE ACCESSION NUMBER: ATCC 43479
aatgaagccattgttgtaaattttgaaagtgaaggcaaaaaacaaaaacttgttttagaagtagcagcacacttgggcgataatagagttagaactattgctatggatatgacagatggcttggtaagaggacttaaagcagaagctttgggtgctcctattagcgttcctgtgggtgaaaaagttttaggaagaatttttaatgttacgggagatttgatcgatgaaggtgaagaaatttcttttgataaaaaatgggcaattcatagagatccaccagcttttgaagatcaaagcacaaaaagtgagatttttgaaacagggattaaagttgtggatttacttgctccttatgcaaaaggtggtaaagtaggtctttttggtggtgcaggtgttggtaaaactgttattattatggagcttattcacaatgttgcatttaaacatagcggctattctgtatttgcaggtgtaggtgagagaactcgtgaaggaaatgacctttataatgaaatgaaagaaagtaatgttttagacaaagttgctctatgttatggacaaatgaatgaaccaccaggggcaagaaatcgtattgctttaacaggtttaacaatggctgagtattttagagatgaaatgggtcttgatgtgcttatgtttattgataatatctttagattttcacaatcaggttctgaaatgtcagcacttttaggaagaattccatcagctgtgggttatcaaccaaccctagcaagtgaaatgggtaaattccaagaaagaattacttcaactaaaaaaggatcaattacttcag

SEQ ID NO: 1850 - DNA, 775 bp, Campylobacter fetus subsp. fetus
  ref <308>: DATABASE ACCESSION NUMBER: ATCC 25936
aaggcaacacgcataaacttattttagagactgctgcacaccttggagataatcgtgtaagaactatcgctatggatatgagcgaaggacttacaagagggttagatgctatagcgcttgggtcgcctatcagtgttcctgttggagaaaaagttttaggaagaatattcaacgtaattggtgatcttatagacgaaggcgaagaagaaaaatttgataaaaaatggtcgattcatagagatccgccggcatttgaagatcaaagcacaaaaagtgaaatttttgaaacaggtataaaagtcgtagatcttttggctccttatgcaaaaggcggtaaagttggactatttggcggtgccggcgttggtaaaacagttatcattatggaacttatccacaacgttgcattcaaacacagcggctattcggtatttgccggtgtcggtgaaagaacaagagagggtaacgatctttataatgaaatgaaagaatccggcgttttggataaagttgccttatgttatggacaaatgaatgaaccgccgggtgcaagaaaccgtatagcgcttactggtcttacaatggctgagtattttcgtgacgagatgggactagatgttcttatgtttatcgataacatcttccgtttctcacaatcaggctcagagatgtcggctcttcttggacgtatcccaagtgcggttggttatcaaccaacgttagctagcgaaatgggaagacttcaagaaagaatcacatcaactaaaaaaggttc

SEQ ID NO: 1851 - DNA, 793 bp, Campylobacter fetus subsp. venerealis
  ref <308>: DATABASE ACCESSION NUMBER: ATCC 33561
cgaagctattgaagtaaattttacagtagaaggcaacacgcataaacttattttagagactgctgcacaccttggagataatcgtgtaagaactatcgctatggatatgagcgaaggacttacaagagggttagatgctatagcgcttgggtcgcctatcagtgttcctgttggagaaaaagttttaggaagaatattcaacgtaattggtgatcttatagacgaaggcgaagaagaaaaatttgataaaaaatggtcgattcatagagatccgccggcatttgaagatcaaagcacaaaaagtgaaatttttgaaacaggtataaaagtcgtagatcttttggctccttatgcaaaaggcggtaaagttggactatttggcggtgccggcgttggtaaaacagttatcattatggaacttatccacaacgttgcattcaaacacagcggctattcggtatttgccggtgtcggtgaaagaacaagagagggtaacgatctttataatgaaatgaaagaatccggcgttttggataaagttgccttatgttatggacaaatgaatgaaccgccgggtgcaagaaaccgtatagcgcttactggtcttacaatggctgagtattttcgtgacgagatgggactagatgttcttatgtttatcgataacatcttccgtttctcacaatcaggctcagagatgtcggctcttcttggacgtatcccaagtgcggttggttatcaaccaacgttagctagcgaaatgggaagacttcaagaaagaatcacatcaact

SEQ ID NO: 1852 - DNA, 825 bp, Campylobacter gracilis
  ref <308>: DATABASE ACCESSION NUMBER: ATCC 33236
ggactatttaccgaagattaacgaagctatcgaggttaaatttgacgtcgagggcgctcatcgcaggctgatcctagaggtagccgcgcaccttggagacaatcgcgtccgcacgatcgctatggatatgagcgatggacttaggcgagggcttgaggccgtcgctttgggcgcgcctattacggtgcctgtgggcgagaaagttttgggtagaatttttaatgttacgggcgatctgatcgacgaaggcgaggatgaaaaatttgaaacccgctggtcgatccacagagatccgcctagctttgaaaatcaaagcacgaagagtgaaatttttgaaaccggcattaaggtagtcgatctgctcgccccttatgcaaagggcggtaaggtaggactattcggcggtgctggcgtcggtaagaccgtcatcatcatggaactgattcacaacgtcgctttcaaacacagcggctactccgtatttgcgggtgtcggcgagcgaacgagagagggaaacgacctttataacgagatgaaagaatcgggcgttttggataaagtcgccttgacctatggtcagatgaacgaaccgccgggagcgagaaaccgtatcgcgctaaccggtcttacgatggccgagtatttccgcgacgagctagggcttgacgttttgatgtttattgataatatcttccgcttctcgcagtcgggttcggagatgtccgcgcttttaggacgaattccgtccgcggtcggttatcagcctacgcttgccagcgaaatgggtaaattacaggagcgcattacttctactaagaagggctc

SEQ ID NO: 1853 - DNA, 818 bp, Campylobacter jejuni subsp. jejuni
  ref <308>: DATABASE ACCESSION NUMBER: ATCC 33560
tttacctcaaattaatgaagcaattgttgtaaattttgaaagcgaaggaaaaaaacataaacttgttttagaagtagcagctcatttaggagataatagagttagaactattgctatggatatgacagatggtttggtaaggggcttaaaagctgaggctttaggtgctcctattagtgttcctgttggtgagaaagttttaggaagaattttcaatgttactggagatttgatcgatgaaggtgaagaaatttcttttgataaaaaatgggcaattcatagagatccgccagcttttgaagatcaaagcacaaaaagtgagatttttgaaacagggattaaagttgtagatttgcttgctccttatgcaaaaggtggtaaagtaggtctttttggtggtgcaggtgttggtaaaactgttattattatggagcttattcacaatgttgcatttaagcatagcggctattctgtatttgcaggtgtgggtgagagaactcgtgaaggaaatgacctttataatgaaatgaaagaaagtaatgttttagacaaagttgctctatgttatggacaaatgaatgaaccaccaggagcaagaaatcgtattgctttaacaggtttaacaatggctgagtattttagagatgaaatgggtcttgatgtgcttatgtttattgataatatctttagattttcacaatcaggttctgaaatgtcagcacttttaggaagaattccatcagctgtgggttatcaaccaaccctagcaagtgaaatgggtaaattccaagaaagaattacttcaactaaaaaaggct

SEQ ID NO: 1854 - DNA, 830 bp, Enterococcus cecorum
  ref <308>: DATABASE ACCESSION NUMBER: ATCC 43198
attacctgatatcaacaacgccttattggtctataaaaatgatgaacaaaaaagtaaaattgtgctagaagctgccttagaattaggtgatggcatcattcgtacaattgccatggaatcaacggatggtttacaacgtgggatggaagttgtcgatactggtaaaccaatttcagttccagttggtaaagaaacgctaggacgtgtctttaacgttttaggggatacgattgatatgcaagaaccatttgcacaagatgcagatcgttctgcaattcataaagctgcaccaaaatttgaagacttaagtacaagtactgaaattttagaaacagggattaaagttatcgacttattagcaccatatttaaaaggtggtaaagtcggtctattcgggggtgccggagtaggtaaaaccgttttaatccaagaattaatccataatattgcacaagaacatggtgggatttctgtatttaccggtgttggtgaacgtacacgtgaaggaaatgacttgtatcatgaaatgcgtgattcaggagttattgaaaaaactgccatggtgtttggtcaaatgaacgaaccacctggagctcgtatgcgtgttgctttaactgggttaacgattgctgaatatttccgtgatgtagaaggacaagatgtgttgctatttattgataacatcttccgtttcactcaagcgggttctgaagtatcagccttgcttggtcgtatgccatctgccgtgggttatcaacctacattggctacagaaatgggtcaattacaagaacgtatcacttcaactaagaagggctctatcacttcta

SEQ ID NO: 1855 - DNA, 823 bp, Enterococcus columbae
  ref <308>: DATABASE ACCESSION NUMBER: ATCC 51263
tctttaccagatatcaataatgcgcttattgtctataaaaatgatgaacaaaaaagtaaaatcgtgcttgaagctgctttagagctaggagatggcattattcgtacgattgcaatggaatcaactgatggattgcaacgtggaatggaagttttcgatacaggtaagccaatttcagtaccagtaggtcgtgaaacattaggtcgtgtatttaatgttttaggtgataccattgatacgcaagaagcttttcctgctgatgcgaatcgtgatgcgattcataaatcagctccagcttttgaagaattaagtacaagtactgaaatcctagaaacagggattaaagttatcgacttactagcaccatacttaaaaggtgggaaagttggtctattcggtggtgccggtgtaggtaaaaccgtattaattcaagaattaattcataatatcgcccaagaacatgggggtatttcagtatttaccggtgttggtgaacgtacacgtgaaggaaatgacttgtatcacgaaatgcgtgattcaggcgttatcgaaaaaactgctatggtgtttgggcaaatgaacgaaccacctggagcacgtatgcgtgttgcgctaactggactaactattgcggaatacttccgtgatgttgaaggccaagacgtattgctatttattgataatatcttccgttttactcaagcaggttctgaagtttctgccttacttggtcgtatgccttctgcggtaggttatcaacctactttggctactgaaatgggtcaattgcaagaacggattacatcaacgaagaaaggttcga

SEQ ID NO: 1856 - DNA, 826 bp, Enterococcus dispar
  ref <308>: DATABASE ACCESSION NUMBER: ATCC 51266
ttaccagacattaataatgccttggttgtctataaaaatgacgaacaaaaaaccaagattgtattagaagctgccttagaactaggagatggtgtgattcgaactatcgccatggaatctactgatggcttacaacggggaatggaagttgtcgatactggcagttccatttctgtaccggtaggaaaagaaacattgggtcgtgtatttaacgttttaggaaatacaattgacttagaagaaccttttccagcggatgctaaacgtagtggtatccataaaaaagcgcctgattttgatgaattaagcactagtacagaaattttagaaacagggattaaagttattgacctattagccccttatttaaaaggtggtaaagtcggattattcggtggtgccggagttggtaaaaccgttttaattcaagaattaattcataatattgcccaagaacatggtgggatttctgtttttactggtgttggtgaaagaacacgtgaaggtaatgacttgtattatgaaatgaaagaatctggcgttatcgaaaaaactgccatggtatttggtcaaatgaatgagccacctggtgcccggatgcgggttgctttaaccggacttaccattgcggaatacttccgggacgttgaaggacaagatgtattgctctttatcgataatattttccgttttacccaagctggttcagaagtatctgccttattaggacggatgccctctgccgttggttatcaaccaactttggctactgaaatgggacaacttcaagaacggattacctcaacgaaaaaaggttctattacat

SEQ ID NO: 1857 - DNA, 814 bp, Enterococcus malodoratus
  ref <308>: DATABASE ACCESSION NUMBER: ATCC 43197
tccttaccagacatcaacaatgcgttgattgtttacaaaaaaaataaaacaaaagttgttcttgaagctgctttggaacttggtgatggtgttatccgcacgatctctatggaatcaacagatggcttgcaacgtggaatggaagttgtcgatacaggcaaaccaatctcagttcccgttggtaaagaaactttaggtcgtgtgtttaacgtattaggtgaaacaatcgacaaagaagcgccttttccagaagatgcagtaaaaagcggtattcataaaaaagcgccggcttttgaagaacttagtaccagtaatgaaattttagaaacagggatcaaagttatcgacttattagctccttacttaaagggtggtaaagtcggactatttggtggtgccggtgttggtaaaaccgtcttgatccaagaattgattcataatatcgcccaagaacacggtggtatttcagtgtttacgggtgttggtgaacgtactcgtgaagggaacgacctttattatgaaatgaaggaatcaggcgttattgagaaaactgccatggtgtttggacaaatgaacgagccgccaggtgcgcgtatgcgtgttgccttgactggtttgacattggctgaatatttccgagatgaagaaggacaagatgtgctgttgtttatcgacaacatcttccgtttcactcaagccggttctgaagtttctgccttgcttggccggatgccttcagccgttggctaccaaccaactttggcaactgaaatgggtcaattgcaagaacgaatcacttcaacgaagaagggct

SEQ ID NO: 1858 - DNA, 791 bp, Enterococcus mundtii
  ref <308>: DATABASE ACCESSION NUMBER: ATCC 43186
cgcattagttgtttataaaaatgatgagcaaaaatcaaaagttgttcttgaagcagcattagaattaggtgacggtgtgatccgtacgatcgcaatggaatcgacggatggactacaacgtggaatggaagtcatcgacacaagcaaagcgatctctgtaccagttggaacagaaacattaggtcgtgtgttcaacgtgttaggtgaaacaatcgatttggaagcaccatttccagaggatgcccaaagaagcgagatccacaagaaagcaccaaattttgatgaattaagcacaagtacagagattcttgaaactgggatcaaagtcattgacttattagcaccttatttaaaaggtgggaaagttggattgtttgggggtgccggtgttggtaaaaccgtactgatccaagaattgatccataatatcgcccaagaacatgggggaatctcagtgtttaccggtgtaggggaacgtacccgtgaaggaaacgatctgtattacgaaatgaaagattcaggcgtaatcgaaaaaacagcgatggtgtttggacaaatgaatgagccaccaggtgctcgtatgcgtgtcgcactaactggattgacgattgcggaatatttccgtgatgtcgaaggacaagacgtgctcttatttattgataatattttccgtttcacccaagcaggttcagaagtatctgccttactaggacgtatgccatcagcggttggttatcaaccaaccttagcgactgaaatgggacaactccaagaacggatcacttcaacga

SEQ ID NO: 1859 - DNA, 817 bp, Enterococcus raffinosus
  ref <308>: DATABASE ACCESSION NUMBER: ATCC 49427
tccttaccagacatcaacaatgcgttgattgtttataaaaaagataaaacaaaagttgttcttgaagctgctttggaacttggtgatggtgttattcgcacaatcgccatggaatcaacggatggattacaacgtggaatggaagttgtcgatactggcaagcctatttctgttccagtaggaaaagaaactctaggtcgtgtatttaatgtattaggtgaaacaatcgacaaggaagcgccttttccagaagatgcagaaaaaagtggtattcacaagaaagcaccaactttcgaagaacttagcacaagtaatgagatcttagaaacaggaatcaaagttattgacttgttagctccttacttaaaaggtggtaaagttggattatttggtggtgccggtgttggtaaaacagtcttgattcaagagctaattcataatatcgctcaagaacatggtggtatttctgtgtttactggtgttggtgaacgtactcgtgaagggaacgacctttattatgaaatgaaagattctggtgttattgagaaaactgctatggtgttcggtcaaatgaacgagccgccaggtgcacgtatgcgtgttgccttaactggtttaaccttagccgaatacttccgtgatgaagaaggacaagatgtgttgctatttattgacaacattttccgtttcactcaagccggatcagaagtttctgccttacttggccgtatgccgtcagcagttggttaccaaccgactttagcaactgaaatgggtcaattacaagaacgtattacgtcgacgaaaaaaggttcaa

SEQ ID NO: 1860 - DNA, 852 bp, Globicatella sanguis
  ref <308>: DATABASE ACCESSION NUMBER: ATCC 51173
cctgacattcataatgcattaattgtaacgaacgctgatatggcggatgtaatgcaagaaaatatttcggatgaagaaaaattattaaccttagaagttgcactggatttaggtcatggaatggtccggacaattgcgatggaatcaaccgatggtttggaacgcggcatgacagttgtggattatttaacaccgattaaagtgccagtaggcgaagccactttaggtagagtattcaatgttttaggtgagacaattgatgaactagaaccggttggcgacgatgttgaactcaaaagtattcatcgtgaagcccctaaatatgaggacttagataatagttttcatgttttagaaaccggaattaaggtcatcgatttattagctccttatattaaagggggaaaaatcggtttattcggtggtgccggagtgggtaaaacggtcttaattcaagaattaattcataatattgcagaacaattaggaggtatctcagttttcactggggttggagaacgtacccgtgaagggaatgacctcgtttttgaaatgcgagagtcaggtgtaagcaagaagacggccatggttttcggtcaaatgaatgaaccacctggagcacgtatgcgtgttgtcttaacaggacttacaatggcggaatatttccgtgacgaattgaaacaagacgtcttattatttattgataatatttatcgttttactcaagcaggttccgaagtgtcagccttattaggtcgtatgccttcagcagtagggtatcaaccaactttagcaagtgaaatgggacaaatgcaagaacgtattacgtcwacgaagcrcggttccattaca

SEQ ID NO: 1861 - DNA, 828 bp, Lactococcus garvieae
  ref <308>: DATABASE ACCESSION NUMBER: ATCC 49156
gcgcgactcttcctgagattaataacgcactcatcgtttacaaagatgtagacggcgttaaaactaaaatcgtccttgaagtggcgttggaacttggtgatggtgccgtacgtaccatcgctatggaatcaactgatggcttgacacgtggacttgaagttctcgatacaggtaaagcaatcagcgtacctgttggtcaagaaacacttggacgtgtcttcaatgtacttggagatgctattgatggaggggaagcatttgctgaaaatgcagaacgcagccctatccataaaaaagccccatcttttgatgaactttcaacagcaaatgaaattctggtgacagggattaaagttattgacttgcttgccccataccttaaaggtggtaagattgggttgttcggtggtgccggagttggtaaaaccgtccttatccaagagttgattcacaatattgcccaagaacacggtggtatttccgtatttactggtgttggggaacgtacacgtgaagggaatgacctttactgggaaatgaaagaatcaggcgttatcgaaaaaacagccatggtcttcggtcaaatgaatgaaccacctggagcacgtatgcgtgttgctcttactggtttgacaattgctgaatatttccgtgatgtagaaaaacaagacgttttgcttttcattgataatatcttccgtttcacccaagccggttcagaagtatctgccctcttaggacgtatgccatcagccgttggttaccaacctacgcttgcaactgaaatgggtcaacttcaagaacgtatcacttcaacaaaacaaggtt

SEQ ID NO: 1862 - DNA, 828 bp, Lactococcus lactis
  ref <308>: DATABASE ACCESSION NUMBER: ATCC 11454
aattgcctgarattaacaatgccttgattgtctacaaagatgtcaatggcctaaaaacaaaaattactcttgaagttgctttggaacttggtgatggtgcagttcgtacaatcgctatggaatctactgatggcttgactcgtggacttgaagtccttgatacaggtaaagcagtcagcgttcctgttggggaagccactcttggtcgtgtttttaacgttcttggtgatgttattgacggtggggaagaatttgctgctgatgcagaacgtaatcctatccataaaaaagctccaacatttgacgaattgtcaactgcaaacgaagttctcgtaactgggattaaagttgtcgatttgcttgcaccttaccttaaaggtggtaaagttggacttttcggtggtgccggagttggtaaaaccgtccttattcaagaattgattcacaacatcgcccaagaacacggaggtatttctgtgtttaccggtgttggggaacgtactcgtgaagggaatgacctttactgggaaatgaaagaatcaggcgttattgaaaaaactgccatggtctttggtcaaatgaatgaaccaccaggagcacgtatgcgtgttgcccttactggtttgacaattgctgaatatttccgtgatgttcaaggtcaagacgtactgcttttcattgacaacatcttccgtttcacacaagctggttcagaagtttctgcccttttgggacgtatgccttctgccgttggttaccaaccaacacttgctactgaaatggggcaattgcaagaacgtatcacttctactaagaagggttctgtta

SEQ ID NO: 1863 - DNA, 825 bp, Listeria ivanovii
  ref <308>: DATABASE ACCESSION NUMBER: ATCC 19119
cttacctgaaatctacaacgccctagttattgaatataaatctgatgcagaagaagcaccaactagccaacttactttagaagtagccattcaattaggtgatgacgttgttcgtacaattgcaatggcatcaactgatggtgttcaaagaggtatggaagttattgatactgggagcccaatcacagttccagttggtacagtaacacttggtcgtgtatttaacgtattaggaaacactatcgatttggatgagccacttccaagcgatatcaagcgtaataaaattcaccgtgaagcaccaacatttgaccaattagcaacaactactgaaattcttgaaacaggaataaaagttgtagacttgctagccccatatttaaaaggtggtaaaattggtttgttcggcggagcgggtgttggtaaaaccgttttaatccaagaacttattcataatatcgctcaagaacatggtggtatttctgtgttcgctggtgttggagaacgtactcgtgaagggaacgatctttactttgaaatgaaagactctggtgtaattgaaaaaactgccatggtattcggtcaaatgaacgaaccaccaggtgctcgtatgcgtgtagctttaacaggtcttacaatcgctgaatatttccgtgatgaagaacaccaagatgtacttctattcattgataatattttccgctttactcaagctggttcagaggtttcggctttactaggtcgtatgccatctgcagtaggttatcaaccaactctagctaccgaaatgggacaattacaagaacgtattacttctactaatgt

SEQ ID NO: 1864 - DNA, 821 bp, Succinivibrio dextrinosolvens
  ref <308>: DATABASE ACCESSION NUMBER: ATCC 19716
gtcatattccagagctttatgacgctctggaggttaagggcgatggtaagcatcgttcagacctagttcttgaggttcaacagcagattggcggtggtgtggtacgctgcattgccatgggttcttctgacggtttgagcagaggaattgaggctgtaaatactggtgccggtgttaaggttccagttggtcgtgagaccctaggacgtattatgaacgttttaggtcagcctgtagatgagagaggtcctatcggacagaaagaggattgggaaattcaccgtccagctcctacctatgctgagcagtcatcaactacagaaattctagaaaccggtattaaggttatggaccttatctgcccatttgctaagggtggtaaagttggtctgttcggtggtgccggtgtgggtaagacagttaacatgatggagcttatcaataacattgctaaggctcactcaggtctatctgtatttaccggtgttggtgagcgtactcgtgagggtaacgacttctaccacgaaatgcaggaatcaaaggttatcgataaggtatcaatgatttacggtcagatgaacgagcctccagggaaccgtctacgtgttgctctgacaggtctgactgttgctgagaagttccgtgacgaaggtctggatgtgcttctgttcatcgataacatctatcgttatacactggctggtacagaggtatctgctctgttaggccgtatgccttcagctgtgggttaccagcctacactggctgaggaaatgggtgtattacaggagcgtattgcttcaactaagaaaggttctatt

SEQ ID NO: 1865 - DNA, 822 bp, Tetragenococcus halophilus
  ref <308>: DATABASE ACCESSION NUMBER: ATCC 33315
tgatactttaccagatatcaataatgcattagccgtatataaaaatgatgagaacaagacgcgtgttgtattggaagctactttagaacttggagatggggtaattcgtgccatttctatggggtctactgacggcttgcaacgtggcatggaagttgtggatacacaagaacctatttctgttccggtaggaaatgatactttaggtcgtgtatttaatgtgttaggagaaacaatagataatcaggagccatttcctgaagatgctgaaaaaagtggtattcacaaaaaagcccctagttttgatgaattaagtactagttcggaaatattagaaacagggatcaaagtgattgatttattagaaccttatctaagaggcggtaaagtcggattgtttggaggcgccggtgttggaaaaacggtgctaattcaagaattgatcaataatgttgcccaagaacacgggggtatttccgtgtttaatggtgtaggtgaacgtactcgtgaaggtaatgacttgtattatgaaatgcaggattcaggcgttatcgaaaaaacagccatggtgtttggtcaaatgaacgaaccaccaggtgctcgtatgcgtgttgctttaactggcctaacactggcagaatattttcgagatgttgaaggtcaagacgtattattatttattgataatattttccgttttacacaagcaggtaccgaagtttccgctttacttggtagaatgccatctgctgttggctatcaacccacactagcaactgaaatggggcaactgcaagaacggattacgtcaacggataaggg

SEQ ID NO: 1866 - DNA, 818 bp, Campylobacter fetus subsp. fetus
  ref <308>: DATABASE ACCESSION NUMBER: ATCC 25936
atctcctcaggatckataggacttgatatagctcttggtataggcggcgtaccaaaaggaagaatagtcgaaatttatgggccagaaagctctggtaaaacaactcttactttgcatttaatagcagaatctcaaaaagtcggcggagtttgcgcgtttgtagatgcagagcatgcacttgatgttaaatatgctaaaaatttaggcgttgatacggataacttatatatttctcaaccggacttcggagagcaagctcttgatatagtagaaactctagctagaagcggcgccgttgatcttatagtaatagatagcgtagcagctytaacaccaaaaagcgaaatagaaggcgatatgggagatcagcacgtagggctgcaagcaagactcatgagtcaagcacttagaaaattaaccggagttgtccataaaatgggaactacagttgtatttataaaccaaattcgtatgaaaatcggcgctatgggctatggcactcctgaaactactactggcggaaatgcgcttaaattttacgcttcagttagacttgacgtacgtaaaatagctactttaaaacagagcgatgagccaatcggaaaccgcgtaaaagtaaaagtagtaaaaaacaaagtcgctcctccttttagacaagccgaatttgatatcatgtttggagaaggtatcagcaaagaaggagagataatagattacggcgtaaaacttgatattatcgataaaagcggcgcttggtttagctatgataattcaaaattaggtcaaggcagagaaaactcaaaagcgtttttaaaaga

SEQ ID NO: 1867 - DNA, 814 bp, Campylobacter fetus subsp. venerealis
  ref <308>: DATABASE ACCESSION NUMBER: ATCC 33561
tctcctcaggatckataggacttgatatagctcttggtataggcggcgtaccaaaaggaagaatagtcgaaatttatgggccagaaagctctggtaaaacaactcttactttgcatttaatagcagaatctcaaaaagtcggcggagtttgcgcgtttgtagatgcagagcatgcacttgatgttaaatatgctaaaaatttaggcgttgatacggataacttatatatttctcaaccggacttcggagagcaagctcttgatatagtagaaactctagctagaagcggcgccgttgatcttatagtaatagatagcgtagcagctytaacaccaaaaagcgaaatagaaggcgatatgggagatcagcacgtagggctgcaagcaagactcatgagtcaagcacttagaaaattaaccggagttgtccataaaatgggaactacagttgtatttataaaccaaattcgtatgaaaatcggcgctatgggctatggcactcctgaaactactactggcggaaatgcgcttaaattttacgcttcagttagacttgacgtacgtaaaatagctactttaaaacagagcgatgagccaatcggaaaccgcgtaaaagtaaaagtagtaaaaaacaaagtcgctcctccttttagacaagccgaatttgatatcatgtttggagaaggtatcagcaaagaaggagagataatagattacggcgtaaaacttgatattatcgataaaagcggcgcttggtttagctatgataattcaaaattaggtcaaggcagagaaaactcaaaagcgtttttaaa

SEQ ID NO: 1868 - DNA, 824 bp, Campylobacter jejuni subsp. jejuni
  ref <308>: DATABASE ACCESSION NUMBER: ATCC 33560
gatagcataggcwcaggttcagttggacttgatcttgctttaggtataggcggtgttccaaaaggaagaattatagaaatttatgggcctgaaagttcaggtaaaactactctaactctacacattatcgcagaatgccaaaaagcaggtggggtttgtgcttttatcgatgcagaacatgcacttgatgtgaaatatgctaaaaatttaggtgtaaatacagatgatttgtatgtttctcaacctgattttggagagcaagccttagaaattgtagaaactatagcwagaagtggtgcagtagatcttatwgtagtagatagcgttgcagcwcttaccccaaaagcagaaattgaaggcgatatgggcgatcarcatgtaggacttcaagcaagacttatgtctcaagctctaagaaaacttacaggtatagttcataaaatgaataccacagtaattttcatcaaccaaattcgtatgaaaatcggtgctatgggttatggtactcctgaaaccacaacaggtggaaatgcattaaaattttatgcttctgtgcgtttagatgttagaaaagtagcaaccttaaamcaaaacgwagamcctataggaaaccgcgttaaagtaaaagtagttaaaaataaagttgctcctccattcagmcaagctgaatttgatgtgatgtttggagagggtttaagccgtgaaggtgaattgatcgattatggtgtaaaacttgatatcgtagataaaagtggtgcgtggttttcttataaagataaaaaacttggacaaggtagagaaaattcaaaagctttcttaaaaga

SEQ ID NO: 1869 - DNA, 388 bp, Enterococcus avium
  ref <308>: DATABASE ACCESSION NUMBER: ATCC 14025
agaaagttctggtaaaacaacggttgcactgcatgcgattgcagaagttcaaaaacatggcgggacggcagcctttattgatgccgagcacgcgttggaccctcaatacgcacaacgtctaggtgtaaacattgatgaattgctgctatcacaaccagatactggggaacaaggcttagaaattgcagatgctttagtttcaagtggcgcagtcgatattatcgttattgactcggtggccgcgctagtcccccgtgctgaaatcgatggcgagatgggtgatgcgcacgttggtctgcaggctcgtttgatgtcacaagcattgcgcaagctgtcaggctctatcaacaaaacaaagactatcgccgtctttattaaccaaattcgt

SEQ ID NO: 1870 - DNA, 388 bp, Enterococcus faecium
  ref <308>: DATABASE ACCESSION NUMBER: ATCC 19434
tgaaagttcaggtaaaacaacagttgcactacacgctattgcagaagtacaaaaaaatggcggaacggccgctttcattgatgctgagcatgcgttagatccgcaatatgcacaaaaattaggtgtgaatatcgatgaactacttctttcacagcctgacacaggagaacaaggtctagagatcgctgatgctttagtatcaagtggggctgtagatatcgtagtagtcgattcagttgctgctttagttccacgagcagaaatcgacggcgaaatgggtgactcacatgtcgggttacaagcacgtttgatgtctcaagcattgcgtaaactctctggttcgatcaacaaaacaaaaacaatcgctattttcatcaaccaaatccgt

SEQ ID NO: 1871 - DNA, 388 bp, Listeria monocytogenes
  ref <308>: DATABASE ACCESSION NUMBER: ATCC 15313
agagagttccggtaaaacaactgttgcgcttcatgcaattgcggaagtacaagcacaaggcggaacagcagcatttatcgatgctgagcatgcgttggatccggcttatgctaaaaacctaggtgtaaatattgatgaattattactatctcaaccagatacaggagaacaagctttagagattgctgaagctttagttagaagtggtgcagttgatatgttagtaattgactccgttgcagcacttgtaccacgtgctgaaatcgaaggcgagatgggcgatgctcatgttggattacaagcacgtttaatgtcccaagcattgcgtaaactttctggtgttattaataaatcaaaaaccattgctattttcattaaccaaattcgt

SEQ ID NO: 1872 - DNA, 388 bp, Streptococcus mitis
  ref <308>: DATABASE ACCESSION NUMBER: ATCC 49456
agagtcatctggtaagacaacggttgcccttcatgcagttgcgcaagcacaaaaagaaggtggtattgctgcctttatcgatgcggaacatgcccttgatccagcttatgctgcggcccttggtgtcaacattgacgaattgctcttgtcacaaccagactcaggagagcaaggtcttgagattgcaggaaaattgattgactcaggagccgtggatcttgtcgtagtcgactcagttgcggcccttgtccctcgtgcggaaattgatggagatatcggtgatagccacgttggtttgcaggctcgtatgatgagccaggctatgcgtaaacttggtgcttctatcaataaaaccaaaacaattgccatctttatcaaccaattgcgt

SEQ ID NO: 1873 - DNA, 430 bp, Streptococcus oralis
  ref <308>: DATABASE ACCESSION NUMBER: ATCC 35037
gaacatgacgccgactttttcacgcaattggttgataaagatggcaattgttttggttttattgatagaagctccgagtttacgcatggcctggctcatcattcgagcctgcaaaccaacgtgactgtctccaatatccccatcaatttccgcacgaggtacaagggccgcaactgagtcgataacgacaaggtcaactgcacctgagtcaatcaattttccagcaatttcaagaccttgttcacctgagtctggttgtgacaagagcaattcgtcaatattcacaccaagggctgcagcataggctgggtcaagagcatgttccgcatcgataaaggctgcaataccaccttctttctgtgcttgcgcaacagcgtgaagggcaaccgttgtcttaccagatgattctggcgcrtacayttcgatgata

SEQ ID NO: 1874 - DNA, 947 bp, Aspergillus fumigatus
  ref <308>: DATABASE ACCESSION NUMBER: ATCC 64746
ttgtcgttgttgctgcctccgacggtcagatgtaggtggaacatcttgggaaatacgtcgtaaaacacgtcgcttacgttttcgcgaataggccccagactcgtgagcatttgctgctcgcccgccaggttggtgtccagaagatcgttgtcttcgtcaacaaaatcgatgctattgatgatccggagatgctggaactggtcgaactcgagatgcgtgagctgctgaacagctacggtttcgagggtgaagagactccgatcattttcggttccgctctctgtgctctcgaaggacgccgtgacgacatcggtaaagacagaattgagcagcttatgaacgctgtcgacacctggatccccactcctcagcgtgacctcgacaaacctttcttgatgtctgtcgaggaagtgttctctatcgccggccgtggtaccgtggcttctggtcgtgtcgagcgtggtatcttgaagaaggactctgaggttgagattgttggaggctccttcgaacccaagaagaccaaagtcaccgacattgaaaccttcaagaagagctgtgatgaatcgcgtgctggtgacaactctggtctcctcctgcgtggtatccgacgtgaagacgtcaagcgtggtatggtcattgctgttcccggcagcaccaaggctcacgacaagttcctcgtctccatgtacgtcctgaccgaggcggagggtggtcgtcgtactggcttcggtgccaactaccgtccccaagtcttcatccgtactgcaggtaagttcccgcacaccgtgtccagatcttccgagagattagcgatatatgctaatgattcatcagacgaggctgctgacctcagcttccctgacggcgaccaatctcgcagagttatgcctggtgacaacgtcgagatgatcctgaagacccaccaccctgttgctgctgaggct

SEQ ID NO: 1875 - DNA, 923 bp, Aspergillus versicolor
  strain WSA-175
gctgcttccgatggtcaaatgtacgtcaaccttatatacaccctctgatatgacagaatgtcgcctaacagcacgcgtgaactaggccccaaacccgtgagcacttgctgcttgcccgccaggtcggtgtccagaagattgttgtgttcgtcaacaaggttgatgccgtcgatgaccctgagatgttggaacttgttgagctggaaatgcgtgagcttctcagcacttacggcttcgaaggcgaggagacccctatcatcttcggttccgccctatgcgccctcgagggtcgccgccccgatatcggtactgagcgaattgacagccttcttgaggccgttgacacctggatccctacccctcagcgtgacctggacaagcctttcctgatgtctgtcgaggaggtcttctccattgccggtcgtggtaccgttgcctctggccgtgttgagcgtggtctccttaagaaggacagcgaggtcgagattctcggaggtggtcaggtcatgaagaccaaggtcactgacattgagacattcaagaagcactgtgacgaatcccgtgctggtgacaactccggtcttcttctccgtggtatccgccgtgaggatgtcaagcgcggtatggttattgctgctcccgcctctatcaaggcccacaagaagttcatggtctccatgtacgtcctcactgaggcagaaggtggccgtcgcagtggcttcggtgtcaactatcgtccccaggcttacattcgcactgctggtaagttttcaaaacattcgacctctcgccttagaagaagaatacctctaacttgtatttagacgaggcttgcgacctttctttccccgatggcgacatgagccgccgtgtcatgcctggtgacaacgtggaaatgatcctcaacctcaacaaccctgtcg

SEQ ID NO: 1876 - DNA, 807 bp, Basidiobolus ranarum
  ref <308>: DATABASE ACCESSION NUMBER: ATCC 24670
catcattgttgtgtccgccactgatggtcaaatgcctcaaactcgtgagcatttgttgttggctcgccaagttggtgtccaacacttggttgtcttcatcaacaaggttgatgccgttgatgatcctgaaatgttggagttggtcgagatggaaatgcgtgatttgctttcccaatacggtttccccggagacaacgtccccattatccagggttccgctctctgcgctcttgaggaccgcaaccccgagatcggccgtaacgccatcatgaagttgatggaggctgttgatagcagcatccccacccctgcccgtgatttggacaaacctttcctcatgcccgttgaagatgtgttctccatctctggccgtggtactgttgccactggacgtgttgagcgtggtatggtcaccaagggtactgaagttgaaatcgtcggtatgggcgagcacttcaagaccaccttgaccggtattgaaatgttccacaaggaattggacaagggtatggctggtgacaacatgggttgcttgcttcgtggtgtcaagcgtgagcaagtccgtcgtggtatggttatctgtgcccccggatccgtcaagccacataagaagttcatggctcagctctacattctcaccaaggatgagggaggccgccacactcccttcgtcaacaactaccgcccacaaatgttcttcagaactgttgatgttaccgccatccttaagcacccccctggtacccccgatgctgatgagaagatggtcatgcccggagacaacgttcaactcgagtgcgagctctt

SEQ ID NO: 1877 - DNA, 806 bp, Campylobacter gracilis
  ref <308>: DATABASE ACCESSION NUMBER: ATCC 33236
agttgtttctgctgcggatggtcctatgcctcaaactcgcgagcatatcttgctttctcgtcaagtaggcgttccatacatcgtagttttcctaaacaaaaccgatatggtcgatgatccggatcttttagagttagttgaagaggaagttagagatcttttaaaagagtataaattccctggcgacgaaaccccaatcattaagggttctgctcttaaggctcttgaggaagctaaggccggacaagacggcgaatggtctgcaaagattatggagcttatggacgcggttgatagctatattccaactcctgttcgcgatactgataaagatttccttcttccgatcgaagatattttctcgatttccggtcgcggtaccgttgtaaccggtagaatcgaaaaaggtatcgttaaagttggtgatactatcgagatcgtaggtattaaacctactcagactactaccgtcactggcgttgagatgtttagaaaagagatggatcaaggtgaagccggcgataatgtaggtgttttattgcgcggtactaagaaagaggaagtagagcgcggtatggttttatgcaaaccaaaatcgatcactcctcatactaaatttgagggcgaggtttatatcctaactaaagaagaaggcggacgccatactccattctttaataattatagaccgcagttttacgttcgtacgacagatgttaccggttcgattactcttcctgaaggaaccgagatggttatgccgggcgacaacgttaaaatcaccgttgagctaatcgctccgatcg

SEQ ID NO: 1878 - DNA, 806 bp, Campylobacter jejuni subsp. jejuni
  ref <308>: DATABASE ACCESSION NUMBER: ATCC 33292
gctgcagatggccctatgccacaaactagagagcacattcttctttctcgtcaagtaggcgttccatatattgttgtttttatgaataaagcagatatggttgatgatgctgaacttttagagttagttgaaatggaaattagagaattattaagctcttatgatttcccaggcgatgatacacctattatttctggttctgctttaaaagctcttgaagaagctaaagctggacaagatggtgaatggtcagcaaaaattatggatcttatggctgcagttgatagctatattccaactccaactcgtgatactgaaaaagacttcttgatgccaattgaagatgttttctcaatttcaggtcgtggtactgttgttacaggtagaattgaaaaaggtgttgtaaaagtaggtgatactatcgaaatcgttggtattaaagatactcaaacaacaactgtaacaggtgttgaaatgttcagaaaagaaatggatcaaggcgaagcaggagataacgtaggtgttcttcttcgtggtactaaaaaagaagaagttatccgtggtatggttcttgctaaaccaaaatcaattactccacacactgacttcgaagctgaagtttatatcttaaataaagatgaaggtggtagacatactccattctttaacaactatagaccacagttttatgtaagaacaactgatgttacaggttcgattaaattagctgatggtgttgaaatggttatgccaggtgaaaatgtgagaattactgtaagcttgatcgctccagtagcacttgaaga

SEQ ID NO: 1879 - DNA, 896 bp, Coccidioides immitis
  strain WSA-222
atgtatgcaaccgagagcactcccggatcttggtttaaatggcactaatataagacaggcctcaaactcgagagcatttacttctcgcccgtcagatcggtatccaaaaaatcgtcgtcttcgtgaacaaggttgatgccatcgaggacaaagagatgttggagcttgttgaattggagatgcgtgaactcctaaccagctacggtttcsagggtgaagaaactcccatcatttttggctctgctctctgtgccctcsaaggaagacaacccgagatcggtgttaccaagattgatgagctcttgcaggccgtcgacacctggattcccactcctcagcgtgagactgacaagcccttcttgatgtccattgaggaagtgttctctatttccggacgaggaaccgttgtctccggccgtgtggagcgtggtatcctcaagaaggactccgaagttgaaattgtcggcggttcgcccgagccaatcaaaaccaaggttaccgatatcgaaacctttaagaagtcttgcgacgagtctcgcgctggtgataactccggcttgctcctacgaggcgttaagcgtgaagatattagccgtggcatggtcgtcgctgtaccaggaagtgtcaaggcccatactgaattcttagtttcgctttacgtcctcaccgaagctgagggtgggcgcaaatctggattcagcagcaagtaccgcccacagatgttcattcgcactgccggtatgtaatactgtgataatttcgttgacatggtactgattgaattctatagacgaagcggctcagctcagctggcccggagaagatcaagacaagatggctatgccaggagacaatatcgaaatgatttgcaccaccttgcacccagttgccgccga

SEQ ID NO: 1880 - DNA, 798 bp, Erwinia amylovora
  ref <308>: DATABASE ACCESSION NUMBER: ATCC 14976
ctggtagttgctgcgactgacggcccaatgcctcagacycgtgagcacatcctgctgggtcgccaggttggcgtgccatacatcatcgtgttcctgaacaaatgtgacatggttgatgatgaagagctgctggagctggttgaaatggaagtmcgtgacctgctgtcacagtacgacttcccaggcgacgacacgccaatcgtgcryggttctgcgctgaaagcgctggarggcgaagcagagtgggaagcgaagatcatcgaactggctggccatctggataactacatcccggaaccagagcgtgcgattgacaaaccgttcctgctgccaattgaagacgtgttctccatctctggccgtggtaccgttgttaccggtcgtgtagagcgcggtrtsgttaaagtgggtgaagaagttgaaatcgttggtatcaaagataccgtgaaatcaacctgtaccggcgttgagatgttccgtaagctgctggacgaaggccgtgcgggtgagaactgtggtatcctgctgcgcggtatcaagcgcgaagatatccagcgtggtcaggttctggcgaagccaggcaccatcaagccacacaccaagttcgagtcagaagtttatattctgtctaaagacgaaggcggccgtcatactccgttcttcaaaggctaccgtccacagttctacttccgtactactgacgtgaccgggactatcgaactgccagaaggcgttgagatggtgatgccaggcgacaacattcagatggttgtgaccctgatccacccgatcgccatg

SEQ ID NO: 1881 - DNA, 810 bp, Salmonella choleraesuis subsp. choleraesuis
  ref <308>: DATABASE ACCESSION NUMBER: ATCC 14028
atcctggttgttgctgcgactgacggyccgatgccgcagacccgtgagcacatcctgctgggtcgtcaggtaggcgttccgtacatcatcgtgttcctgaacaaatgcgacatggttgatgacgaagagctgctggaactggttgaaatggaagttcgygaactgctgtctcagtacgacttcccgggcgacgacactccgatcgttcgtggttctgctctgaaagcgctggaaggcgacgcagagtgggaagcgaaaatcatcgaactggctggcttcctggattcttacatyccggaaccagagcgtgcgattgacaagccgttcctgctgccgatcgaagacgtattctccatctccggtcgtggtaccgttgttaccggtcgtgtagarcgcggtatcatcaaagtgggcgaagaagttgaaatcgttggtatcaaagagactcagaagtctacctgtactggcgttgaaatgttccgcaaactgctggacgaaggccgtgccggtgagaacgtaggtgttctgctgcgtggtatcaaacgtgaagaaatcgaacgtggtcaggtactggctaagccgggcaccatcaagccgcacaccaagttcgaatctgaagtgtacattctgtccaaagatgaaggcggccgtcatactccgttcttcaaaggctaccgtccgcagttctacttccgtactactgacgtgactggcaccatcgaactgccggaaggcgtagagatggtaatgccgggcgacaacatcaaaatggttgttaccctgatccacccgatcgcgatggacgacggt

SEQ ID NO: 1882 - DNA, 888 bp, Staphylococcus cohnii
  strain BM10711
atgaatttttatttagaggagtttaacttgtctattcccgattcaggtccatacggtataacttcatcagaagacggaaaggtatggttcacacaacataaggcaaacaaaatcagcagtctagatcagagtggtaggataaaagaattcgaagttcctacccctgatgctaaagtgatgtgtttaattgtatcttcacttggagacatatggtttacagagaatggtgcaaataaaatcggaaagctctcaaaaaaaggtggctttacagaatatccattgccacagccggattctggtccttacggaataacggaaggtctaaatggcgatatatggtttacccaattgaatggagatcgtataggaaagttgacagctgatgggactatttatgaatatgatttgccaaataagggatcttatcctgcttttattactttaggttcggataacgcactttggttcacggagaaccaaaataattctattggaaggattacaaatacagggaaattagaagaatatcctctaccaacaaatgcagcggctccagtgggtatcactagtggtaacgatggtgcactctggtttgtcgaaattatgggcaacaaaataggtcgaatcactacaactggtgagattagcgaatatgatattccaactccaaacgcacgtccacacgctataaccgcggggaaaaatagcgaaatatggtttactgaatggggggcaaatcaaatcggcagaattacaaacgacaaaacaattcaagaatatcaacttcaaacagaaaatgcggaacctcatggtattacctttggaaaagatggatccgtatggtttgcattaaaatgtaaaattgggaagctgaatttgaacgaatga

SEQ ID NO: 1883 - DNA, 23 bp, Artificial Sequence
  Synthetic DNA Sequence
agccgcttgagcaaattaaacta

SEQ ID NO: 1884 - DNA, 23 bp, Artificial Sequence
  Synthetic DNA Sequence
gtatcccgcagataaatcaccac

SEQ ID NO: 1885 - DNA, 21 bp, Artificial Sequence
  Synthetic DNA Sequence
agcgaaaaacaccttgccgac

SEQ ID NO: 1886 - DNA, 18 bp, Artificial Sequence
  Synthetic DNA Sequence
gacgcccgcgccaccact

SEQ ID NO: 1887 - DNA, 19 bp, Artificial Sequence
  Synthetic DNA Sequence
gacgcccgcgacaccacta

SEQ ID NO: 1888 - DNA, 19 bp, Artificial Sequence
  Synthetic DNA Sequence
gacgcccgcaacaccacta

SEQ ID NO: 1889 - DNA, 20 bp, Artificial Sequence
  Synthetic DNA Sequence
gttcgcaactgcagctgctg

SEQ ID NO: 1890 - DNA, 19 bp, Artificial Sequence
  Synthetic DNA Sequence
ttcgcaacggcagctgctg

SEQ ID NO: 1891 - DNA, 18 bp, Artificial Sequence
  Synthetic DNA Sequence
  modified_base (14): i
ccggagctgccgancggg

SEQ ID NO: 1892 - DNA, 18 bp, Artificial Sequence
  Synthetic DNA Sequence
cggagctgccaarcgggg

SEQ ID NO: 1893 - DNA, 18 bp, Artificial Sequence
  Synthetic DNA Sequence
ggagctggcgarcggggt

SEQ ID NO: 1894 - DNA, 18 bp, Artificial Sequence
  Synthetic DNA Sequence
gaccggagctagcgarcg

SEQ ID NO: 1895 - DNA, 19 bp, Artificial Sequence
  Synthetic DNA Sequence
cggagctagcaarcggggt

SEQ ID NO: 1896 - DNA, 21 bp, Artificial Sequence
  Synthetic DNA Sequence
gaaacggaactgaatgaggcg

SEQ ID NO: 1897 - DNA, 21 bp, Artificial Sequence
  Synthetic DNA Sequence
cattaccatgggcgataacag

SEQ ID NO: 1898 - DNA, 22 bp, Artificial Sequence
  Synthetic DNA Sequence
ccattaccatgagcgataacag

SEQ ID NO: 1899 - DNA, 861 bp, Klebsiella pneumoniae
  strain 15571
atgcgttatattcgcctgtgtattatctccctgttagccaccctgccgctggcggtacacgccagcccgcagccgcttgagcaaattaaactaagcgaaagccagctgtcgggccgcgtaggcatgatagaaatggatctggccagcggccgcacgctgaccgcctggcgcgccgatgaacgctttcccatgatgagcacctttaaagtagtgctctgcggcgcagtgctggcgcgggtggatgccggtgacgaacagctggagcgaaagatccactatcgccagcaggatctggtggactactcgccggtcagcgaaaaacaccttgccgacggcatgacggtcggcgaactctgcgccgccgccattaccatgagcgataacagcgccgccaatctgctactggccaccgtcggcggccccgcaggattgactgcctttttgcgccagatcggcgacaacgtcacccgccttgaccgctgggaaacggaactgaatgaggcgcttcccggcgacgcccgcgacaccactaccccggccagcatggccgcgaccctgcgcaagctgctgaccagccagcgtctgagcgcccgttcgcaacggcagctgctgcagtggatggtggacgatcgggtcgccggaccgttgatccgctccgtgctgccggcgggctggtttatcgccgataagaccggagctggcgagcggggtgcgcgcgggattgtcgccctgcttggcccgaataacaaagcagagcgcattgtggtgatttatctgcgggataccccggcgagcatggccgagcgaaatcagcaaatcgccgggatcggcgcggcgctgatcgagcactggcaacgctaa

SEQ ID NO: 1900 - DNA, 780 bp, Klebsiella pneumoniae
  strain SLK-47
ctgttagccaccctgccgctggcggtacacgccagcccgcagccgcttgagcaaattaaactaagcgaaagccagctgtcgggccgcgtaggcatgatagaaatggatctggccagcggccgcacgctgaccgcctggcgcgccgatgaacgctttcccatgatgagcacctttaaagtagtgctctgcggcgcagtgctggcgcgggtggatgccggtgacgaacagctggagcgaaagatccactatcgccagcaggatctggtggactactcgccggtcagcgaaaaacaccttgccgacggcatgacggtcggcgaactctgcgccgccgccattaccatgagcgataacagcgccgccaatctgctactggccaccgtcggcggccccgcaggattgactgcctttttgcgccagatcggcgacaacgtcacccgccttgaccgctgggaaacggaactgaatgaggcgcttcccggcgacgcccgcgccaccactaccccggccagcatggccgcgaccctgcgcaagctgctgaccagccagcgtctgagcgcccgttcgcaacggcagctgctgcagtggatggtggacgatcgggtcgccggaccgttgatccgctccgtgctgccggcgggctggtttatcgccgataagaccggagctggcgagcggggtgcgcgcgggattgtcgccctgcttggcccgaataacaaagcagagcgcattgtggtgatttatctgcgggataccccggcgagcatggccgagcgaaat

SEQ ID NO: 1901 - DNA, 861 bp, Escherichia coli
atgcgttatattcgcctgtgtattatctccctgttagccaccctgccgctggcggtacacgccagcccgcagccgcttgagcaaattaaactaagcgaaagccagctgtcgggccgcgtaggcatgatagaaatggatctggccagcggccgcacgctgaccgcctggcgcgccgatgaacgctttcccatgatgagcacctttaaagtagtgctctgcggcgcagtgctggcgcgggtggatgccggtgacgaacagctggagcgaaagatccactatcgccagcaggatctggtggactactcgccggtcagcgaaaaacaccttgccgacggcatgacggtcggcgaactctgcgccgccgccattaccatgagcgataacagcgccgccaatctgctactggccaccgtcggcggccccgcaggattgactgcctttttgcgccagatcggcgacaacgtcacccgccttgaccgctgggaaacggaactgaatgaggcgcttcccggcgacgcccgcaacaccactaccccggccagcatggccgcgaccctgcgcaagctgctgaccagccagcgtctgagcgcccgttcgcaacggcagctgctgcagtggatggtggacgatcgggtcgccggaccgttgatccgctccgtgctgccggcgggctggtttatcgccgataagaccggagctggcgagcggggtgcgcgcgggattgtcgccctgcttggcccgaataacaaagcagagcgcattgtggtgatttatctgcgggataccccggcgagcatggccgagcgaaatcagcaaatcgccgggatcggcgcggcgctgatcgagcactggcaacgctaa

SEQ ID NO: 1902 - DNA, 861 bp, Klebsiella pneumoniae
  strain 803
atgcgttatattcgcctgtgtattatctccctgttagccaccctgccgctggcggtacacgccagcccgcagccgcttgagcaaattaaacaaagcgaaagccagctgtcgggccgcgtaggcatgatagaaatggatctggccagcggccgcacgctgaccgcctggcgcgccgatgaacgctttcccatgatgagcacctttaaagtagtgctctgcggcgcagtgctggcgcgggtggatgccggtgacgaacagctggagcgaaagatccactatcgccagcaggatctggtggactactcgccggtcagcgaaaaacaccttgccgacggcatgacggtcggcgaactctgcgccgccgccattaccatgagcgataacagcgccgccaatctgctgctggccaccgtcggcggccccgcaggattgactgcctttttgcgccagatcggcgacaacgtcacccgccttgaccgctgggaaacggaactgaatgaggcgcttcccggcgacgcccgcgacaccactaccccggccagcatggccgcgaccctgcgcaagctgctgaccagccagcgtctgagcgcccgttcgcaacggcagctgctgcagtggatggtggacgatcgggtcgccggaccgttgatccgctccgtgctgccggcgggctggtttatcgccgataagaccggagctgccgagcggggtgcgcgcgggattgtcgccctgcttggcccgaataacaaagcagagcgcattgtggtgatttatctgcgggatacgccggcgagcatggccgagcgaaatcagcaaatcgccgggatcggcgcggcgctgatcgagcactggcaacgctaa

SEQ ID NO: 1903 - DNA, 896 bp, Klebsiella pneumoniae
  ref <308>: DATABASE ACCESSION NUMBER: ATCC 700603
atgcgttattttcgcctgtgtattatctccctgttagccaccctgccgctggcggtacacgccagcccgcagccgcttgagcaaattaaactaagcgaaagccagctgtcgggcagcgtaggcatgatagaaatggatctggccagcggccgcacgctgaccgcctggcgcgccgatgaacgctttcccatgatgagcacctttaaagtagtgctctgcggcgcagtgctggcgcgggtggatgccggtgacgaacagctggagcgaaagatccactatcgccagcaggatctggtggactactcgccggtcagcgaaaaacaccttgccgacggcatgacggtcggcgaactctgtgccgccgccattaccatgagcgataacagcgccgccaatctgctgctggccaccgtcggcggccccgcaggattgactgcctttttgcgccagatcggcgacaacgtcacccgccttgaccgctgggaaacggaactgaatgaggcgcttcccggcgacgcccgcgacaccactaccccggccagcatggccgcgaccctgcgcaagctgctgaccagccagcgtctgagcgcccgttcgcaacggcagctgctgcagtggatggtggacgatcgggtcgccggaccgttgatccgctccgtgctgccggcgggctggtttatcgccgataagaccggagctgccaaacggggtgcgcgcgggattgtcgccctgcttggcccgaataacaaagcagagcggattgtggtgatttatctgcgggatacgccggcgagcatggccgagcgaaatcagcaaatcgccgggatcggcgcggcgctgatcgagcactggcaacgctaacccggcggtggccgcgcgcgttatccggctcgtag

SEQ ID NO: 1904 - DNA, 861 bp, Escherichia coli
  strain JC2926
atgcgttatattcgcctgtgtattatctccctgttagccaccctgccgctggcggtacacgccagcccgcagccgcttgagcaaattaaactaagcgaaagccagctgtcgggccgcgtaggcatgatagaaatggatctggccagcggccgcacgctgaccgcctggcgcgccgatgaacgctttcccatgatgagcacctttaaagtagtgctctgcggcgcagtgctggcgcgggtggatgccggtgacgaacagctggagcgaaagatccactatcgccagcaggatctggtggactactcgccggtcagcgaaaaacaccttgccgacggcatgacggtcggcgaactctgcgccgccgccattaccatgagcgataacagcgccgccaatctgctactggccaccgtcggcggccccgcaggattgactgcctttttgcgccagatcggcgacaacgtcacccgccttgaccgctgggaaacggaactgaatgaggcgcttcccggcgacgcccgcgacaccactaccccggccagcatggccgcgaccctgcgcaagctgctgaccagccagcgtctgagcgcccgttcgcaacggcagctgctgcagtggatggtggacgatcgggtcgccggaccgttgatccgctccgtgctgccggcgggctggtttatcgccgataagaccggagctagcgagcggggtgcgcgcgggattgtcgccctgcttggcccgaataacaaagcagagcgcattgtggtgatttatctgcgggataccccggcgagcatggccgagcgaaatcagcaaatcgccgggatcggcgcggcgctgatcgagcactggcaacgctaa

SEQ ID NO: 1905 - DNA, 861 bp, Pseudomonas aeruginosa
atgcgttatattcgcctgtgtattatctccctgttagccaccctgccgctggcggtacacgccagcccgcagccgcttgagcaaattaaactaagcgaaagccagctgtcgggccgcgtaggcatgatagaaatggatctggccagcggccgcacgctgaccgcctggcgcgccgatgaacgctttcccatgatgagcacctttaaagtagtgctctgcggcgcagtgctggcgcgggtggatgccggtgacgaacagctggagcgaaagatccactatcgccagcaggatctggtggactactcgccggtcagcgaaaaacaccttgccgacggcatgacggtcggcgaactctgcgccgccgccattaccatgagcgataacagcgccgccaatctactactggccaccgtcggcggccccgcaggattgactgcctttttgcgccagatcggcgacaacgtcacccgccttgaccgctgggaaacggaactgaatgaggcgcttcccggcgacgcccgcgacaccactaccccggccagcatggccgcgaccctgcgcaagctgctgaccagccagcgtctgagcgcccgttcgcaacggcagctgctgcagtggatggtggacgatcgggtcgccggaccgttgatccgctccgtgctgccggcgggctggtttatcgccgataagaccggagctagcaaacggggtgcgcgcgggattgtcgccctgcttggcccgaataacaaagcagagcgcattgtggtgatttatctgcgggatacgccggcgagcatggccgagcgaaatcagcaaatcgccgggatcggcgcggcgctgatcgagcactggcaacgctaa

SEQ ID NO: 1906 - DNA, 20 bp, Artificial Sequence
  Synthetic DNA Sequence
ccttattcccttttttgcgg

SEQ ID NO: 1907 - DNA, 22 bp, Artificial Sequence
  Synthetic DNA Sequence
cacctatctcagcgatctgtct

SEQ ID NO: 1908 - DNA, 23 bp, Artificial Sequence
  Synthetic DNA Sequence
aacagcggtaagatccttgagag

SEQ ID NO: 1909 - DNA, 22 bp, Artificial Sequence
  Synthetic DNA Sequence
atgacttggttaagtactcacc

SEQ ID NO: 1910 - DNA, 22 bp, Artificial Sequence
  Synthetic DNA Sequence
atgacttggttgagtactcacc

SEQ ID NO: 1911 - DNA, 22 bp, Artificial Sequence
  Synthetic DNA Sequence
ccataaccatgggtgataacac

SEQ ID NO: 1912 - DNA, 22 bp, Artificial Sequence
  Synthetic DNA Sequence
ccataaccatgagtgataacac

SEQ ID NO: 1913 - DNA, 20 bp, Artificial Sequence
  Synthetic DNA Sequence
cgccttgatcattgggaacc

SEQ ID NO: 1914 - DNA, 20 bp, Artificial Sequence
  Synthetic DNA Sequence
cgccttgatcgttgggaacc

SEQ ID NO: 1915 - DNA, 20 bp, Artificial Sequence
  Synthetic DNA Sequence
cgccttgatagttgggaacc

SEQ ID NO: 1916 - DNA, 20 bp, Artificial Sequence
  Synthetic DNA Sequence
cgtgggtcttgcggtatcat

SEQ ID NO: 1917 - DNA, 20 bp, Artificial Sequence
  Synthetic DNA Sequence
cgtgggtctggcggtatcat

SEQ ID NO: 1918 - DNA, 21 bp, Artificial Sequence
  Synthetic DNA Sequence
gtgggtctcacggtatcattg

SEQ ID NO: 1919 - DNA, 21 bp, Artificial Sequence
  Synthetic DNA Sequence
cgtgggtctctcggtatcatt

SEQ ID NO: 1920 - DNA, 20 bp, Artificial Sequence
  Synthetic DNA Sequence
  misc_feature (1)...(20): n=a,t,c or g
cgtggntctcgcggtatcat

SEQ ID NO: 1921 - DNA, 21 bp, Artificial Sequence
  Synthetic DNA Sequence
cgtgggtctagcggtatcatt

SEQ ID NO: 1922 - DNA, 24 bp, Artificial Sequence
  Synthetic DNA Sequence
gttttccaatgattagcactttta

SEQ ID NO: 1923 - DNA, 24 bp, Artificial Sequence
  Synthetic DNA Sequence
gttttccaatgataagcactttta

SEQ ID NO: 1924 - DNA, 23 bp, Artificial Sequence
  Synthetic DNA Sequence
gttttccaatgctgagcactttt

SEQ ID NO: 1925 - DNA, 23 bp, Artificial Sequence
  Synthetic DNA Sequence
cgttttccaatgatgagcacttt

SEQ ID NO: 1926 - DNA, 23 bp, Artificial Sequence
  Synthetic DNA Sequence
gttttccaatggtgagcactttt

SEQ ID NO: 1927 - DNA, 861 bp, Neisseria meningitidis
  strain MC9690-129
atgagtattcaacattttcgtgtcgcccttattcccttttttgcggcattttgccttcctgtttttgctcacccagaaacgctggtgaaagtaaaagatgctgaagatcagttgggtgcacgagtgggttacatcgaactggatctcaacagcggtaagatccttgagagttttcgccccgaagaacgttttccaatgatgagcacttttaaagttctgctatgtggtgcggtattatcccgtgttgacgccgggcaagagcaactcggtcgccgcatacactattctcagaatgacttggttgagtactcaccagtcacagaaaagcatcttacggatggcatgacagtaagagaattatgcagtgctgccataaccatgagtgataacactgctgccaacttacttctgacaacgatcggaggaccgaaggagctaaccgcttttttgcacaacatgggggatcatgtaactcgccttgatcgttgggaaccggagctgaatgaagccataccaaacgacgagcgtgacaccacgatgcctgcagcaatggcaacaacgttgcgcaaactattaactggcgaactacttactctagcttcccggcaacaattaatagactggatggaggcggataaagttgcaggaccacttctgcgctcggcccttccggctggctggtttattgctgataaatctggagccggtgagcgtgggtctcgcggtatcattgcagcactggggccagatggtaagccctcccgtatcgtagttatctacacgacggggagtcaggcaactatggatgaacgaaatagacagatcgctgagataggtgcctcactgattaagcattggtaa

SEQ ID NO: 1928 - DNA, 861 bp, Escherichia coli 220>
  strain HB251
atgagtattcaacatttccgtgtcgcccttattcccttttttgcggcattttgccttcctgtttttgctcacccagaaacgctggtgaaagtaaaagatgctgaagatcagttgggtgcacgagtgggttacatcgaactggatctcaacagcggtaagatccttgagagttttcgccccgaagaacgttttccaatgatgagcacttttaaagttctgctatgtggcgcggtattatcccgtgttgacgccgggcaagagcaactcggtcgccgcatacactattctcagaatgacttggttaagtactcaccagtcacagaaaagcatcttacggatggcatgacagtaagagaattatgcagtgctgccataaccatgagtgataacactgcggccaacttacttctgacaacgatcggaggaccgaaggagctaaccgcttttttgcacaacatgggggatcatgtaactcgccttgatcattgggaaccggagctgaatgaagccataccaaacgacgagcgtgacaccacgatgcctgcagcaatggcaacaacgttgcgcaaactattaactggcgaactacttactctagcttcccggcaacaattaatagactggatggaggcggataaagttgcaggaccacttctgcgctcggcccttccggctggctggtttattgctgataaatctggagccggtgagcgtgggtctcgcggtatcattgcagcactggggccagatggtaagccctcccgtatcgtagttatctacacgacggggagtcaggcaactatggatgaacgaaatagacagatcgctgagataggtgcctcactgattaagcattggtaa

SEQ ID NO: 1929 - DNA, 808 bp, Klebsiella oxytoca
  strain 26W
atgagtattcaacatttccgtgtcgcccttattcccttttttgcggcattttgccttcctgtttttgctcacccagaaacgctggtgaaagtaaaagatgctgaagatcagttgggtgcacgagtgggttacatcgagctggatctcaacagcggtaagatccttgagagttttcgccccgaagaacgttttccaatgatgagcacttttaaagttctgctatgtggtgcggtattatcccgtgttgacgccgggcaagagcaactcggtcgccgcatacactattctcagaatgacttggttgagtactcaccagtcacagaaaagcatcttacggatggcatgacagtaagagaattatgcagtgctgccataaccatgagtgataacactgcggccaacttacttctgacaacgatcggaggaccgaaggagctaaccgcttttttgcacaacatgggggatcatgtaacccgccttgatagttgggaaccggagctgaatgaagccataccaaacgacgagcgtgacaccacgatgcctgcagcaatggcaacaacgttgcgcaaactattaactggcgaactacttactctagcttcccggcaacaattaatagactggatggaggcggataaagttgcaggaccacttctgcgctcggcccttccggctggctggtttattgctgataaatctggagccggtaagcgtggatctcgcggtatcattgcagcactggggccagatggtaagccctcccgtatcgtagttatctacacgacggggagtcaggcaactatggatg

SEQ ID NO: 1930 - DNA, 861 bp, Escherichia coli
atgagtattcaacattttcgtgtcgcccttattcccttttttgcggcattttgccttcctgtttttgctcacccagaaacgctggtgaaagtaaaagatgctgaagatcagttgggtgcacgagtgggttacatcgaactggatctcaacagcggtaagatccttgagagttttcgccccgaagaacgttttccaatgatgagcacttttaaagttctgctatgtggcgcggtattatcccgtgttgacgccgggcaagagcaactcggtcgccgcatacactattctcagaatgacttggttgagtactcaccagtcacagaaaagcatcttacggatggcatgacagtaagagaattatgcagtgctgccataaccatgagtgataacactgctgccaacttacttctgacaacgatcggaggaccgaaggagctaaccgcttttttgcacaacatgggggatcatgtaactcgccttgatcgttgggaaccggagctgaatgaagccataccaaacgacgagcgtgacaccacgatgcctgcagcaatggcaacaacgttgcgcaaactattaactggcgaactacttactctagcttcccggcaacaattaatagactggatggaggcggataaagttgcaggaccacttctgcgctcggcccttccggctggctggtttattgctgataaatctggagccggtgagcgtgggtctggcggtatcattgcagcactggggccagatggtaagccctcccgtatcgtagttatctacacgacggggagtcaggcaactatggatgaacgaaatagacagatcgctgagataggtgcctcactgattaagcattggtaa

SEQ ID NO: 1931 - DNA, 861 bp, Escherichia coli
  strain BM2728
atgagtattcaacatttccgtgtcgcccttattcccttttttgcggcattttgccttcctgtttttgctcacccagaaacgctggtgaaagtaaaagatgctgaagatcagttgggtgcacgagtgggttacatcgaactggatctcaacagcggtaagatccttgagagttttcgccccgaagaacgttttccaatgatgagcacttttaaagttctgctatgtggcgcggtattatcccgtgttgacgccgggcaagagcaactcggtcgccgcatacactattctcagaatgacttggttgagtactcaccagtcacagaaaagcatcttacggatggcatgacagtaagagaattatgcagtgctgccataaccatgagtgataacactgcggccaacttacttctgacaacgatcggaggaccgaaggagctaaccgcttttttgcacaacatgggggatcatgtaactcgccttgatcgttgggaaccggagctgaatgaagccataccaaacgacgagcgtgacaccacgatgcctgcagcaatggcaacaacgttgcgcaaactattaactggcgaactacttactctagcttcccggcaacaattaatagactggatggaggcggataaagttgcaggaccacttctgcgctcggcccttccggctggctggtttattgctgataaatctggagccggtgagcgtgggtctctcggtatcattgcagcactggggccagatggtaagccctcccgtatcgtagttatctacacgacggggagtcaggcaactatggatgaacgaaatagacagatcgctgagataggtgcctcactgattaagcattggtaa

SEQ ID NO: 1932 - DNA, 861 bp, Escherichia coli
atgagtattcaacattttcgtgtcgcccttattcccttttttgcggcattttgccttcctgtttttgctcacccagaaacgctggtgaaagtaaaagatgctgaagatcagttgggtgcacgagtgggttacatcgaactggatctcaacagcggtaagatccttgagagttttcgccccgaagaacgttttccaatgctgagcacttttaaagttctgctatgtggtgcggtattatcccgtgttgacgccgggcaagagcaactcggtcgccgcatacactattctcagaatgacttggttgagtactcaccagtcacagaaaagcatcttacggatggcatgacagtaagagaattatgcagtgctgccataaccatgagtgataacactgctgccaacttacttctgacaacgatcggaggaccgaaggagctaaccgcttttttgcacaacatgggggatcatgtaactcgccttgatcgttgggaaccggagctgaatgaagccataccaaacgacgagcgtgacaccacgatgcctgcagcaatggcaacaacgttgcgcaaactattaactggcgaactacttactctagcttcccggcaacaattaatagactggatggaggcggataaagttgcaggaccacttctgcgctcggcccttccggctggctggtttattgctgataaatctggagccggtgagcgtgggtctagcggtatcattgcagcactggggccagatggtaagccctcccgtatcgtagttatctacacgacggggagtcaggcaactatggatgaacgaaatagacagatcgctgagataggtgcctcactgattaagcattggtaa

SEQ ID NO: 1933 - DNA, 861 bp, Escherichia coli
atgagtattcaacatttccgtgtcgcccttattcccttttttgcggcattttgccttcctgtttttgctcacccagaaacgctggtgaaagtaaaagatgctgaagatcagttgggtgcacgagtgggttacatcgagctggatctcaacagcggtaagatccttgagagttttcgccccgaagaacgttttccaatggtgagcacttttaaagttctgctatgtggtgcggtattatcccgtgttgacgccgggcaagagcaactcggtcgccgcatacactattctcagaatgacttggttgagtactcaccagtcacagaaaagcatcttacggatggcatgacagtaagagaattatgcagtgctgccataaccatgagtgataacactgcggccaacttacttctgacaacgatcggaggaccgaaggagctaaccgcttttttgcacaacatgggggatcatgtaacccgccttgatcgtcgggaaccggagctgaatgaagccataccaaacgacgagcgtgacaccacgatgcctgcagcaatggcaacaacgttgcgcaaactattaactggcgaactacttactctagcttcccggcaacaattaatagactggatggaggcggataaagttgcaggaccacttctgcgctcggcccttccggctggctggtttattgctgataaatctggagccggtgagcgtggatctcgcggtatcattgcagcactggggccagatggtaagccctcccgtatcgtagttatctacacgacggggagtcaggcaactatggatgaacgagatagacagatcgctgagataggtgcctcactgattaagcattggtaa

SEQ ID NO: 1934 - DNA, 25 bp, Artificial Sequence
  Synthetic DNA Sequence
gaacgccagcgcgaaattcaaaaag

SEQ ID NO: 1935 - DNA, 21 bp, Artificial Sequence
  Synthetic DNA Sequence
agctcggcatacttcgacagg

SEQ ID NO: 1936 - DNA, 15 bp, Artificial Sequence
  Synthetic DNA Sequence
taccacccgcacggc

SEQ ID NO: 1937 - DNA, 17 bp, Artificial Sequence
  Synthetic DNA Sequence
cggagtcgccgtcgatg

SEQ ID NO: 1938 - DNA, 41 bp, Artificial Sequence
  Synthetic DNA Sequence
ccgcgcaccattgcttcgtacactgaggagtctccgcgcgg

SEQ ID NO: 1939 - DNA, 46 bp, Artificial Sequence
  Synthetic DNA Sequence
cgacccggatggtagtatcgataatgatccgccagcggccgggtcg

SEQ ID NO: 1940 - DNA, 19 bp, Artificial Sequence
  Synthetic DNA Sequence
gtatcgttggtgacgtaat

SEQ ID NO: 1941 - DNA, 18 bp, Artificial Sequence
  Synthetic DNA Sequence
gcaatggtccgtttaagt

SEQ ID NO: 1942 - DNA, 27 bp, Artificial Sequence
  Synthetic DNA Sequence
gactggaacaaagcctataaaaaatca

SEQ ID NO: 1943 - DNA, 16 bp, Artificial Sequence
  Synthetic DNA Sequence
gctggtggacggccag

SEQ ID NO: 1944 - DNA, 19 bp, Artificial Sequence
  Synthetic DNA Sequence
tttcgccgccatgcgttac

SEQ ID NO: 1945 - DNA, 17 bp, Artificial Sequence
  Synthetic DNA Sequence
cggcgactacgcggtat

SEQ ID NO: 1946 - DNA, 17 bp, Artificial Sequence
  Synthetic DNA Sequence
cggcgacttcgcggtat

SEQ ID NO: 1947 - DNA, 19 bp, Artificial Sequence
  Synthetic DNA Sequence
cggtatacggcaccatcgt

SEQ ID NO: 1948 - DNA, 19 bp, Artificial Sequence
  Synthetic DNA Sequence
gcggtatacaacaccatcg

SEQ ID NO: 1949 - DNA, 19 bp, Artificial Sequence
  Synthetic DNA Sequence
cggtatacgccaccatcgt

SEQ ID NO: 1950 - DNA, 15 bp, Artificial Sequence
  Synthetic DNA Sequence
ggcgacatcgcctgc

SEQ ID NO: 1951 - DNA, 17 bp, Artificial Sequence
  Synthetic DNA Sequence
ggcgacagagcctgcta

SEQ ID NO: 1952 - DNA, 19 bp, Artificial Sequence
  Synthetic DNA Sequence
cctgctatggagcgatggt

SEQ ID NO: 1953 - DNA, 21 bp, Artificial Sequence
  Synthetic DNA Sequence
cgcctgctataaagcgatggt

SEQ ID NO: 1954 - DNA, 589 bp, Klebsiella pneumoniae subsp. pneumoniae
  ref <308>: DATABASE ACCESSION NUMBER: ATCC 13883
acaccggtcaacattgaggaagagcttaagaactcttatctggattatgcgatgtcggtcattgttggccgtgcgctgccggatgtccgagatggcctgaagccggtacaccgtcgcgtactttacgccatgaacgtattgggcaatgactggaacaaagcctataaaaaatcagcccgtgtcgttggtgacgtaatcggtaaataccacccgcacggcgactccgcggtatacgacaccatcgtgcgtatggcgcagccgttctcgctgcgttacatgctggtggacggccagggtaactttggttccatcgacggcgactccgccgcggcgatgcgttataccgaaattcgtctggcgaaaatcgctcatgagctgatggccgatcttgaaaaagagacggtcgatttcgtcgacaactatgacggtacggagcgtattccggacgtcatgccgaccaaaattcctaacctgctggtgaacggcgcctccgggatcgccgtagggatggccaccaacataccgccacataacctgacggaagtgattaacggctgtctggcgtatgttgacgatgaagacatcagca

SEQ ID NO: 1955 - DNA, 38 bp, Artificial Sequence
  Synthetic DNA Sequence
cgcgcaaccattgcttcgtacactgaggagtctgcgcg

SEQ ID NO: 1956 - DNA, 989 bp, Candida inconspicua
  ref <308>: DATABASE ACCESSION NUMBER: ATCC 16783
cggtaaaaccactttaactgctgcaatcaccaaagttttatctgaagaaggtggtgcagatttcttagattattcatctattgataaagcaccagaagagagagctagaggtattaccatttctactgctcatgttgaatatgaaactccaaacagacattattcacatgttgattgtccaggtcatcaagattatattaagaacatgattactggtgcagctcaaatggatggtgctattattgttgttgcagctactgatggtcaaatgccacaaactaaggaacatttattattagctagacaagttggtgttcaacatttagttgtttttgttaacaagtgtgataccgttgatgatccagaaatgttrgaattagttgaaatggaaatgagagaattattgaccgaatatggattygatggtgataacacaccagttattatgggttctgcattaatggcattagaaggtaagagaccagaagttggtaaagaatctattgttaagttaatggaagctgttgatacttggattccaactccacaaagagacttagaaaaaccattcttattaccaattgatgaagttttctctatttctggtagaggtactgttgtttctggtactgttgatagaggtacattaaagaagggtgaagaagttgaaattgttggtggtaaagaaggtgttattaagactactgttaccggtattgaaatgtatcacaaggaattagatcaagcacaagctggtgatactccaggtattttgttaagaggtgttaagagagatcaaattgcaagaggtcaaattcttgcaaagccaggwtctgttaaggcatacaagaagttcttatcatcattatacattttaacaaaggaagaaggtggtagacatactccattttctgaaaattacagacctcaaatgtacattagaacttccaatgttaatgttactttgaagttcccagaaactgaagaag

SEQ ID NO: 1957 - DNA, 991 bp, Candida utilis
  ref <308>: DATABASE ACCESSION NUMBER: ATCC 22023
ggtaagaccacccttactgccgccatcaccaagtgccttgctgagaagggaggtgcctcgttcttggactacagtgccatcgacaaggcgccagaggagagagcaagaggtatcaccatctccactgcgcacgttgagtatgaaactgccaacagacactactcgcacgttgactgtccaggtcacgctgattacatcaagaacatgattaccggtgctgcgcagatggacggtgctatcattgtcgttgcagccactgacggtcagatgccacagaccagagaacacttgttgcttgccagacaagttggtgtccagcacattgttgtcttcgtcaacaaggttgacaccatcgacgaccctgagatgcttgagcttgttgaaatggagatgagagagttgcttacttcgtatggatttgacggtgataacaccccagttatcatgggttctgctttgtgtgctttggaaggccgtgagccagagattggtgctaaggccattgacaagttgatggaggccattgatgagtacatcccaactcctcagagagacctggaaaagccattcytgatgggtgttgaagacgtgttctcgatctctggtagaggtaccgttgtcacrggccgtgttgagcgtggtaacttgaagaaaggtgatgaaattgaacttgttggctacaacaagaacccaatcaagaccaccgtcaccggtatcgaaatgttcaagaaggagttggaatctgccatggctggtgacaactgtggtatcttgttgcgtggtatcaagagagatgacgtcaagagaggtatggttgctgctaagccaggctccgtctctgcacacaccaagttcctcgcttccttgtacatcctgacraaggaggaaggtggtcgtcacagtgcctttgctgagaactacagaccacagatgttcatcagaaccggagatgtcaccaccatcttgacatggccagaggagcacgctgacc

SEQ ID NO: 1958 - DNA, 985 bp, Candida zeylanoides
  ref <308>: DATABASE ACCESSION NUMBER: ATCC 7351
cggtaagaccactttgaccgccgccatcaccaaggtgttgagcgccaaaggtggtgcttccttcttggactacgggtccatcgacagagcccctgaggagagagccagaggtattactatctcgactgcccacgttgagtacgagaccgataagagacactacgcccacgttgattgccctggtcacgctgattacatcaagaacatgatcactggtgccgcccaaatggacggtgccattattgtcgttgctgcttctgatggccaaatgccgcagaccagagagcacttgttgcttgccagacaggttggtgtgcagaacttggttgtgtttgttaacaaggtggacaccatcgacgaccccgaaatgttggagttggtggagatggaaatgagagaattgttgacccactacggctttgacggtgacaacacccctgtcatcatgggttcggcgttgtgtgccttggaagacaggcagcctgagattggcgagcaagccatcatgaagttgttggacgctgtcgacgagtacattcccactcctcagagagacttggagcaaccatttttgatgcccgttgaggatgttttctccatctctggcagaggtactgttgtcaccggtcgtgttgagagaggctcattgaagaagggtgaggagattgagattgttggcgacttccccaagcccttcaagactaccgtcaccggcattgagatgttcaagaaggagttggatgccgcgatggcgggcgacaacgccgggatcttgttgagaggtgtcaagagagacgaggtctcgagaggtatggttttggccaagcccggtactgtcacttcgcacaccaaggtgttggcgtcgctttacatcttgaccaaagaggaaggtggccgccactcgccctttggtgagaactacaagccacagttattcatcagaacctccgatgtcactggtactttgaggttccccgccggtgag

SEQ ID NO: 1959 - DNA, 973 bp, Candida catenulata
  ref <308>: DATABASE ACCESSION NUMBER: ATCC 10565
cggtaagaccaccttgactgccgccatcaccaaggttctctccgagaagggtggtgccgacttcttggactacggtgccattgacagagcccccgaggagcgtgcccgtggtatcaccatctccactgcccacgttgagtacgagactgacaaccgtcactacgcccacattgactgtcccggtcacgctgattacatcaagaacatgattaccggtgccgcccagatggacggtgccattattgtccttgctgctactgacggtgccatgccccagacccgcgagcacttgcttctcgcccgtcaggttggtatccaggaattggttgtgtttgtgaacaaggttgacaccatcgacgaccccgagatgttggagctcgttgagatggagatccgcgagttgttgtctgagttcggttttgacggtgacaacacccccgtcatcatgggttccgctttgtgcgctttggagggcaagcagcccgagattggtgagcaggctatcaccaagttgatggccgccgttgacgagcacatccccaccccccagcgtgacttggagcagcctttcttgatgcctgttgagggtgttttctctatctctggccgtggtaccgtggtgactggtaaggttgcccgtggtgtcctcaagaagggtgaggagattgagattgttggcaactttgacaagccctacaaggtgactgttactggtattgagatgttcaagaaggagttggaccaggccatggctggtgacaacgccggtatcttgttgcgtggtgtcaagcgtgacgaggtgtctcgtggtatggttttggccaagcccggcactgttgtctcgcacaagaaggttttggcttcgctttacatcttgacccaggaggagggtggccgtaagaccggcttcggctccaactacaagccccagttgttcttgcgcactaccgacgtcactggtaccctcaccttc

SEQ ID NO: 1960 - DNA, 985 bp, Candida krusei
  ref <308>: DATABASE ACCESSION NUMBER: ATCC 28870
aagactaccttgactgctgcaatcaccaaggtcttagctgatcaaggtggtgctgatttcttagattatgcatctattgacaaggctcctgaagaaagagcaagaggtattactatctctactgctcacgttgagtatgaaaccccaaacagacattattctcatgtcgattgtcctggccatcaagattatattaagaatatgattactggtgctgcacaaatggatggtgctattattgttgttgctgctactgatggtcaaatgccacaaactaaggaacatttattattagcaagacaagttggtgttcaacatttagttgtctttgttaataaatgtgacaccattgatgacccagaaatgttggaattagttgaaatggaaatgagagaactattgtctgaatatggttttgatggtgataacactccagttattatgggttctgcattgatggctttagaagacaagagacctgaagttggtaaggaatctattttaaagttaatggaagcygttgacacatggattccaaccccagagagagatttagaaaaaccatttttgttacctattgatgaagttttctcaatctctggtagaggtactgtcgtttctggtactgtcgaaagaggtactttgaagaagggtgaagaagttgaaattgttggtggtaaggatggttctattaaaactactgtcacaggtattgaaatgtatcacaaggaattagaccaagcgcaagcaggtgatactccaggtattttattaagaggtgtcaagagagaccaaatcaagagaggtcaaattttagcaaagccagattccgttaaggcatacaagaagttcttggcttccctttatatcttaaccaaggaagaaggtggtagacatacaccattctctgaaaactacagaccacaaatgtacatcagaactaccaatgttaacgttactttgaagttcccagacactgaagaag

SEQ ID NO: 1961 - DNA, 22 bp, Artificial Sequence
  Synthetic DNA Sequence
gctcaaggcagatggcattccc

SEQ ID NO: 1962 - DNA, 22 bp, Artificial Sequence
  Synthetic DNA Sequence
ggacaaggcggttgcgtttgat

SEQ ID NO: 1963 - DNA, 22 bp, Artificial Sequence
  Synthetic DNA Sequence
cattcccgtctcgctcgacagt

SEQ ID NO: 1964 - DNA, 19 bp, Artificial Sequence
  Synthetic DNA Sequence
atctgcctgcccgtcttgc

SEQ ID NO: 1965 - DNA, 816 bp, Unknown Organism
  Description of Unknown Organism: Plasmid pGS05
atgaataaatcgctcatcattttcggcatcgtcaacataacctcggacagtttctccgatggaggccggtatctggcgccagacgcagccattgcgcaggcgcgtaagctgatggccgagggggcagatgtgatcgacctcggtccggcatccagcaatcccgacgccgcgcctgtttcgtccgacacagaaatcgcgcgtatcgcgccggtgctggacgcgctcaaggcagatggcattcccgtctcgctcgacagttatcaacccgcgacgcaagcctatgccttgtcgcgtggtgtggcctatctcaatgatattcgcggttttccagacgctgcgttctatccgcaattggcgaaatcatctgccaaactcgtcgttatgcattcggtgcaagacgggcaggcagatcggcgcgaggcacccgctggcgacatcatggatcacattgcggcgttctttgacgcgcgcatcgcggcgctgacgggtgccggtatcaaacgcaaccgccttgtccttgatcccggcatggggttttttctgggggctgctcccgaaacctcgctctcggtgctggcgcggttcgatgaattgcggctgcgcttcgatttgccggtgcttctgtctgtttcgcgcaaatcctttctgcgcgcgctcacaggccgtggtccgggggatgtcggggccgcgacactcgctgcagagcttgccgccgccgcaggtggagctgacttcatccgcacacacgagccgcgccccttgcgcgacgggctggcggtattggcggcgctgaaagaaaccgcaagaattcgttaa

SEQ ID NO: 1966 - DNA, 19 bp, Artificial Sequence
  Synthetic DNA Sequence
catgccagtcttgccaacg

SEQ ID NO: 1967 - DNA, 23 bp, Artificial Sequence
  Synthetic DNA Sequence
cagcaataagtaatccagcgatg

SEQ ID NO: 1968 - DNA, 20 bp, Artificial Sequence
  Synthetic DNA Sequence
ggagagatttcaccgcatag

SEQ ID NO: 1969 - DNA, 22 bp, Artificial Sequence
  Synthetic DNA Sequence
agccaaccatcatgctattcca

SEQ ID NO: 1970 - DNA, 1206 bp, Unknown Organism
  Description of Unknown Organism: Transposon Tn10
atgaatagttcgacaaagatcgcattggtaattacgttactcgatgccatggggattggccttatcatgccagtcttgccaacgttattacgtgaatttattgcttcggaagatatcgctaaccactttggcgtattgcttgcactttatgcgttaatgcaggttatctttgctccttggcttggaaaaatgtctgaccgatttggtcggcgcccagtgctgttgttgtcattaataggcgcatcgctggattacttattgctggctttttcaagtgcgctttggatgctgtatttaggccgtttgctttcagggatcacaggagctactggggctgtcgcggcatcggtcattgccgataccacctcagcttctcaacgcgtgaagtggttcggttggttaggggcaagttttgggcttggtttaatagcggggcctattattggtggttttgcaggagagatttcaccgcatagtcccttttttatcgctgcgttgctaaatattgtcactttccttgtggttatgttttggttccgtgaaaccaaaaatacacgtgataatacagataccgaagtaggggttgagacgcaatcgaattcggtatacatcactttatttaaaacgatgcccattttgttgattatttatttttcagcgcaattgataggccaaattcccgcaacggtgtgggtgctatttaccgaaaatcgttttggatggaatagcatgatggttggcttttcattagcgggtcttggtcttttacactcagtattccaagcctttgtggcaggaagaatagccactaaatggggcgaaaaaacggcagtactgctcgaatttattgcagatagtagtgcatttgcctttttagcgtttatatctgaaggttggttagatttccctgttttaattttattggctggtggtgggatcgctttacctgcattacagggagtgatgtctatccaaacaaagagtcatgagcaaggtgctttacagggattattggtgagccttaccaatgcaaccggtgttattggcccattactgtttactgttatttataatcattcactaccaatttgggatggctggatttggattattggtttagcgttttactgtattattatcctgctatcgatgaccttcatgttaacccctcaagctcaggggagtaaacaggagacaagtgcttag

SEQ ID NO: 1971 - DNA, 21 bp, Artificial Sequence
  Synthetic DNA Sequence
cygactgygccatcctyatca

SEQ ID NO: 1972 - DNA, 21 bp, Artificial Sequence
  Synthetic DNA Sequence
  modified_base (3): i
  modified_base (13): i
mgncagctcatynttgcwksc

SEQ ID NO: 1973 - DNA, 21 bp, Artificial Sequence
  Synthetic DNA Sequence
  modified_base (9): i
  modified_base (16): i
racaccrgnyttggwntcctt

SEQ ID NO: 1974 - DNA, 22 bp, Artificial Sequence
  Synthetic DNA Sequence
  modified_base (8): i
acaagggntggrmsaaggagac

SEQ ID NO: 1975 - DNA, 21 bp, Artificial Sequence
  Synthetic DNA Sequence
tgrccrgggtggttraggacg

SEQ ID NO: 1976 - DNA, 21 bp, Artificial Sequence
  Synthetic DNA Sequence
  modified_base (16): i
gatggaytcygtyaantggga

SEQ ID NO: 1977 - DNA, 21 bp, Artificial Sequence
  Synthetic DNA Sequence
gatggaytcygtyaartggga

SEQ ID NO: 1978 - DNA, 23 bp, Artificial Sequence
  Synthetic DNA Sequence
  modified_base (5): i
catcntgyaatggyaatctyaat

SEQ ID NO: 1979 - DNA, 23 bp, Artificial Sequence
  Synthetic DNA Sequence
catcytgyaatggyaasctyaat

SEQ ID NO: 1980 - DNA, 22 bp, Artificial Sequence
  Synthetic DNA Sequence
  modified_base (9): i
  modified_base (12): i
  modified_base (14): i
tcratggcntcnanragrgtyt

SEQ ID NO: 1981 - DNA, 21 bp, Artificial Sequence
  Synthetic DNA Sequence
  modified_base (9): i
  modified_base (15): i
tggacaccnscaagnggkcyg

SEQ ID NO: 1982 - DNA, 21 bp, Artificial Sequence
  Synthetic DNA Sequence
  modified_base (9): i
  modified_base (15): i
tggacacynscaagnggkcyg

SEQ ID NO: 1983 - DNA, 21 bp, Artificial Sequence
  Synthetic DNA Sequence
  modified_base (14): i
cygaytgcgcyatnctcatca

SEQ ID NO: 1984 - DNA, 21 bp, Artificial Sequence
  Synthetic DNA Sequence
cygaytgygcyatyctsatca

SEQ ID NO: 1985 - DNA, 1383 bp, Cryptococcus neoformans
  strain M1-106
atgggtaaggacaagctgcacgtcaacgtcgttgttatcggtcacgtcgactccggtaagtcgaccaccaccggtcacttgatctacaagtgcggtggtatcgacaagcgaaccattgagaagttcgagaaggaggctcaagagctcggaaagtcttctttcaagtacgcttgggttcttgacaagcttaaggccgagcgagagcgaggtatcaccatcgacattgctctttggaagttcgagacccctaagtaccaggttaccgtcattgacgcccccggtcaccgagacttcatcaagaacatgatcaccggtacctcccaggctgactgtgccatcctcatcattgccaccggtatcggtgagttcgaggctggtatctccaaggacggtcagacccgagagcacgccctcctcgccttcaccctcggtgtcaggcagctcattgttgcttgcaacaagatggacacctgcaagtggtctgaggaccgattcaacgaaatcgtcaaggagaccaacggtttcatcaagaaggttggttacaaccccaaggctgtccccttcgtccccatctctggttggcacggtgacaacatgttggaggagaccaccaacatgccctggtacaagggatggaccaaggagaccaagtccggtgtttccaagggtaagacccttctcgaggccatcgacgccagtaggccccctacccgacccaccgacaagcccctccgtctccctctccaggacgtctacaagatcggtggtatcggcacagtccctgtcggccgagtcgagaccggtgtcatcaaggccggtatggtcgtcaagttcgcccccaccaacgtcaccactgaagtcaagtccgttgagatgcaccacgagcagatccccgagggtctccccggagacaacgttggtttcaacgtcaagaacgtttccatcaaggacatccgacgaggtaacgtctgtggtgactccaagaacgacccccctatggaggctgcttctttcaacgcccaggttatcgtccttaaccaccctggtcagatcggtgccggttacacccccgttctcgactgtcacactgcccacattgcttgcaagttctctgagttgatcgagaagattgaccgacgaaccggtaaggtcatggaggccgcccccaagttcgtcaagtctggtgacgccgccattgtcaagcttgtttcccagaagcctctctgtgttgagacctacgccgactacccccctcttggtcgattcgccgtccgagacatgcgacagaccgttgccgttggtgttattaagagtgtggagaagtccgatgggaagagcggcaaggttaccaaggccgccgagaaggctgctaagaagaagtaa

SEQ ID NO: 1986 - DNA, 1380 bp, Cryptococcus neoformans
  strain B3501
atgggtaaggacaagctgcacgtcaacgtcgttgttatcggtcacgtcgactccggtaagtcgaccaccaccggtcacttgatctacaagtgcggtggtatcgacaagcgaaccattgagaagttcgagaaggaggctcaagagctcggaaagtcttctttcaagtacgcttgggttcttgacaagcttaaggccgagcgagagcgaggtatcaccatcgacattgctctttggaagttcgagacccccaggtaccaggtcaccgtcattgacgcccccggtcaccgagacttcatcaagaacatgatcaccggtacctcccaggctgactgtgccatcctcatcattgccaccggtatcggtgagttcgaggccggtatctccaaggacggtcagacccgagagcacgccctcctcgccttcaccctcggtgtcaggcagctcattgttgcttgcaacaagatggacacctgcaagtggtccgaggaccgattcaacgaaatcgtcaaggagaccaacggtttcatcaagaaggttggctacaaccccaaggctgtccccttcgtccccatctctggttggcacggtgacaacatgttggaggagaccaccaacatgccctggtacaagggatggaccaaggagaccaagtctggtgtttccaggggtaagacccttctcgaggccatcagcgccagtaggccccatacccgacccaccgacaagcccctccgtctccctctccaggacgtctacaagatcggtggtatcggcacagtccctgtcggccgagtcgagaccggtgtcatcaaggccggtatggtcgtcaagttcgcccccaccaacgtcaccactgaagtcaagtccgttgagatgcaccacgagcagatccccgagggtcttcccggagacaacgttggtttcaacgtcaagaacgtttccatcaaggacatccgacgaggtaacgtctgtggtgactccaagaacgacccccctatggaggctgcttctttcaacgcccaggttatcgtccttaaccaccctggtcagatcggtgccggttacacccccgttctcgactgtcacactgcccacattgcctgcaagtttgctgagttgatcgagaagattgaccgacgaaccggtaaggtcatggaggccgcccccaagttcgtcaagtctggtgacgccgccattgtcaagcttgttgcccagaagcccctctgtgttgagacctacgccgactacccccctcttggtcgattcgccgtccgagacatgcgacagaccgttgccgttggtgttatcaagagcgtggacaagaccgagaagggtggcaaggtcaccaaggctgctgagaaggctgccaagaagaagtaa

SEQ ID NO: 1987 - DNA, 1377 bp, Saccharomyces cerevisiae
atgggtaaagagaagtctcacattaacgttgtcgttatcggtcatgtcgattctggtaagtctaccactaccggtcatttgatttacaagtgtggtggtattgacaagagaaccatcgaaaagttcgaaaaggaagccgctgaattaggtaagggttctttcaagtacgcttgggttttggacaagttaaaggctgaaagagaaagaggtatcactatcgatattgctttgtggaagttcgaaactccaaagtaccaagttaccgttattgatgctccaggtcacagagatttcatcaagaacatgattactggtacttctcaagctgactgtgctatcttgattattgctggtggtgtcggtgaattcgaagccggtatctctaaggatggtcaaaccagagaacacgctttgttggctttcaccttgggtgttagacaattgattgttgctgtcaacaagatggactccgtcaaatgggacgaatccagattccaagaaattgtcaaggaaacctccaactttatcaagaaggttggttacaacccaaagactgttccattcgtcccaatctctggttggaacggtgacaacatgattgaagctaccaccaacgctccatggtacaagggttgggaaaaggaaaccaaggccggtgtcgtcaagggtaagactttgttggaagccattgacgccattgaacaaccatctagaccaactgacaagccattgagattgccattgcaagatgtttacaagatcggtggtattggtactgtgccagtcggtagagttgaaaccggtgtcatcaagccaggtatggttgttactttcgccccagctggtgttaccactgaagtcaagtccgttgaaatgcatcacgaacaattggaacaaggtgttccaggtgacaacgttggtttcaacgtcaagaacgtttccgttaaggaaatcagaagaggtaacgtctgtggtgacgctaagaacgatccaccaaagggttgcgcttctttcaacgctaccgtcattgttttgaaccatccaggtcaaatctctgctggttactctccagttttggattgtcacactgctcacattgcttgtagattcgacgaattgttggaaaagaacgacagaagatctggtaagaagttggaagaccatccaaagttcttgaagtccggtgacgctgctttggtcaagttcgttccatctaagccaatgtgtgttgaagctttcagtgaatacccaccattaggtagattcgctgtcagagacatgagacaaactgtcgctgtcggtgttatcaagtctgttgacaagactgaaaaggccgctaaggttaccaaggctgctcaaaaggctgctaagaaataa

SEQ ID NO: 1988 - DNA, 1377 bp, Saccharomyces cerevisiae; identical to SEQ ID NO: 665

SEQ ID NO: 1989 - DNA, 1377 bp, Eremothecium gossypii
  ref <308>: DATABASE ACCESSION NUMBER: ATCC 10895
atgggtaaggaaaagactcacgttaacgttgtcgtcatcggtcacgtcgactctggtaagtctactaccaccggtcacttgatctacaagtgtggtggtattgacaagagaaccatcgagaagttcgagaaggaggctgccgagttgggtaagggttctttcaagtacgcctgggttttggacaaattgaaggctgagagagagagaggtatcaccatcgacattgcgttgtggaagttcgagactccaaagtaccacgtcactgtcattgacgccccaggccacagagacttcatcaagaacatgattaccggtacttctcaagctgactgtgccatcttgatcattgctggtggtgtcggtgagttcgaggctggtatctccaaggacggtcagaccagagagcacgctttgttggcttacaccttgggtgtcaagcagttgatcgttgccatcaacaagatggactccgtcaagtgggacgagtccagataccaggagattgtcaaggagacctccaacttcatcaagaaggtcggttacaaccctaagactgttccattcgttccaatctccggctggaacggtgacaacatgattgaggccaccaccaacgccccatggtacaagggctgggagaaggagaccaaggctggtgccgtcaagggtaagaccttgttggaggccattgacgccattgagccacctgtcagaccaactgacaaggcattgagattgccattgcaggatgtctacaagatcggtggtattggtacggttccagtcggcagagtcgagaccggtgtcatcaagccaggtatggttgttaccttcgccccatccggtgtcaccactgaagtcaagtccgtcgagatgcaccacgagcaattggaggagggtgtcccaggtgacaacgttggtttcaacgtcaagaacgtctccgtcaaggagatcagaagaggtaacgtttgcggtgactccaagaacgacccaccaaaggctgctgagtccttcaacgctaccgtcattgtcttgaaccacccaggtcaaatctctgccggttactctccagtcttggactgtcacactgcccacattgcttgtaagttcgacgagttgttggagaagaacgacagaagaaccggtaagaagttggaagactctccaaagttcctaaaggccggtgacgctgccatggtcaagtttgtcccatccaagccaatgtgtgttgaggctttcaccgactacccaccattgggtagattcgctgtcagagacatgagacagaccgttgctgtcggtgtcatcaagtctgttgtcaagtccgacaaggctggtaaggtcaccaaggccgcccaaaaggctggtaagaaatag

SEQ ID NO: 1990 - DNA, 1377 bp, Eremothecium gossypii
atgggtaaggaaaagactcacgttaacgttgtcgtcatcggtcacgtcgactctggtaagtctactaccaccggtcacttgatctacaagtgtggtggtattgacaagagaaccatcgagaagttcgagaaggaggctgccgagttgggtaagggttctttcaagtacgcctgggttttggacaaattgaaggctgagagagagagaggtatcaccatcgacattgcgttgtggaagttcgagactccaaagtaccacgtcactgtcattgaccccccaggccacagagacttcatcaagaacatgattaccggtacttctcaagctgactgtgccatcttgatcattgctggtggtgtcggtgagttcgaggctggtatctccaaggacggtcagaccagagagcacgctttgttggcttacaccttgggtgtcaagcagttgatcgttgccatcaacaagatggactccgtcaagtgggacgagtccagataccaggagattgtcaaggagacctccaacttcatcaagaaggtcggttacaaccctaagactgttccattcgttccaatctccggctggaacggtgacaacatgattgaggccaccaccaacgccccatggtacaagggctgggagaaggagaccaaggctggtgccgtcaagggtaagaccttgttggaggccattgacgccattgagccacctgtcagaccaactgacaaggcattgagattgccattgcaggatgtctacaagatcggtggtattggtacggttccagtcggcagagtcgagaccggtgtcatcaagccaggtatggttgttaccttcgccccatccggtgtcaccactgaagtcaagtccgtcgagatgcaccacgagcaattggaggagggtgtcccaggtgacaacgttggtttcaacgtcaagaacgtctccgtcaaggagatcagaagaggtaacgtttgcggtgactccaagaacgacccaccaaaggctgctgagtccttcaacgctaccgtcattgtcttgaaccacccaggtcaaatctctgccggttactctccagtcttggactgtcacactgcccacattgcttgtaagttcgacgagttgttggagaagaacgacagaagaaccggtaagaagttggaagactctccaaagttcctaaaggccggtgacgctgccatggtcaagtttgtcccatccaagccaatgtgtgttgaggctttcaccgactacccaccattgggtagattcgctgtcagagacatgagacagaccgttgctgtcggtgtcatcaagtctgttgtcaagtccgacaaggctggtaaggtcaccaaggccgcccaaaaggctggtaagaaatag

SEQ ID NO: 1991 - DNA, 1646 bp, Aspergillus oryzae
  strain KBN616
tggggtaagtttatcaacccgtcgagttgtgttgcatctcagatcatggctgacaagtactttcctccttacagtaaggaagacaagcagcacatcaacatcgtcgttatcggccacgtcgattccggcaagtccaccaccactggtcacttgatctacaagtgtggtggtatcgaccagcgtaccatcgagaagttcgagaaggaagccgctgagctcggtaagggttccttcaagtacgcctgggttcttgacaagctcaagtccgagcgtgagcgtggtatcaccatcgatatcgccctctggaagttccagacctccaagtatgaggtcaccgtcattggtaagcatttgagttccaacctacgttgcccaacatttacagtcatctaacaaagttcaatagatgcccccggtcaccgtgacttcatcaagaacatgatcactggtacttcccaggctgactgcgctatcctcatcattgcctccggtactggtgaattcgaggctggtatctccaaggatggtcagacccgtgagcacgctctgctcgctttcaccctcggtgtccgtcagctcatcgttgccctcaacaagatggacacctgcaagtggtctcaggatcgttacaacgaaatcgttaaggagacttccaacttcatcaagaaggtcggatacaaccccaagagcgttcctttcgtccccatctccggtttcaacggtgacaacatgattgaggcctccaccaactgcccctggtacaagggctgggagaaggagaccaaggctggcaagtccaccggtaagacccttctcgaggccatcgatgccatcgagccccccgtccgtcccaccgacaagcctctccgtcttcccctccaggatgtctacaagatctctggtatcggtactgtgcccgtcggtcgtgtcgagactggtgtcatcaagcctggtatggtcgttactttcgctcctgccaacgtgaccactgaagtcaagtccgttgaaatgcaccaccagcagctccaggccggtaaccccggtgacaacgttggtttcaacgtcaagaacgtctccgtcaaggaagtccgccgtggtaacgttgccggtgactccaagaacgacccccctgctggctgcgattccttcaacgcccaggtcatcgtccttaaccaccccggtcaggtcggcaacggttacgctcccgtcctggactgccacaccgctcacattgcttgcaagttcgctgagctccttgagaagattgaccgccgtaccggtaaatctgttgaggacaagcccaagttcatcaagtctggtgatgctgccatcgtcaagatgattccctccaagcccatgtgtgtggagtctttcactgacttcccccctcttggtcgtttcgctgtccgtgacgtaagtttttccctcttgactatcttcacaatttttcacatattttcacgcctcgtcccactctttttcctcccttcctctttggttcccctttttgcctgcaagttctctatagctaacatgatgtctagatgcgtcaaactgttgccgtcggagttatcaagtcggttgagaagaacactggcggttctggcaaggtcaccaaggccgcccagaaggctggcaagaaataa

SEQ ID NO: 1992 - DNA, 1380 bp, Aureobasidium pullulans
  strain R106
atgggtaaggaaaagtcccacatcaacgtcgtcgttatcggccacgtcgactccggtaagtcgaccaccaccggtcacttgatctacaagtgcggtggtatcgacaagcgtaccatcgagaagttcgagaaggaagccgccgaactcggcaagggttccttcaagtacgcctgggtcctcgacaagctgaagtctgagcgtgagcgtggtatcactatcgatatcgctctgtggaagttcgagacccccaagtacatggtcaccgtcatcgatgcccccggtcaccgtgatttcatcaagaacatgatcactggtacctcccaggctgactgcgccattctcatcattgccgccggtactggtgagttcgaggctggtatctccaaggatggccagactcgtgagcacgcccttctcgcctacacccttggtgtcaagcagctcatcgtcgctatcaacaagatggacaccaccaagtggtctgaggcccgttaccaggagatcatcaaggagacctccggtttcatcaagaaggtcggctacaaccccaagcacgttccctttgtccccatctcgggtttcaacggtgacaacatgattgaggtttcttccaactgcccctggtacaagggttgggagaaggagaccaaggccaaggccactggtaagactctcctcgaggccattgacgccatcgaccctccttcgcgccccaccgacaagcccctccgtcttcccctccaggatgtctacaagatcggtggtattggcacggtgcccgtcggccgtgtcgagaccggtaccatcaagggtggtatggtcgtcaccttcgcccccgctggtgtcaccactgaggtcaagtccgtcgagatgcaccacgagcagctctccgagggtctccccggtgacaacgtcggcttcaacgtcaagaacgtctccgtcaaggagatccgtcgtggtaacgttgccggtgactccaagaacgacccccccaagggttgcgactccttcaacgcccaggtcatcgtcctcaaccaccccggtcaggtcggtgctggttacgcacccgtcctcgattgccacactgcccacatcgcctgcaagttctccgagcttgttgagaagattgaccgccgtaccggcaagtccgttgaggccgcccccaagttcatcaagtctggtgacgccgccatcgtcaagatggttccctccaagcctatgtgtgttgaggccttcactgactaccctcctctcggtcgtttcgccgtccgtgacatgagacagaccgtcgctgtcggtgtcatcaagtccgtcgccaagtccgacaagcagggtgccggtaaggttaccaaggccgctgtcaaggctggcaagaagtaa

SEQ ID NO: 1993 - DNA, 1383 bp, Histoplasma capsulatum
  strain 186AS
atgggtaaggaagacaagactcacattaacctcgtcgtcatcggccacgtcgattcgggcaaatctaccaccactggtcatttgatctacaaatgcggtggtattgacagccgtaccattgagaagttcgaaaaggaagccgaagagttgggcaagaaatccttcaaatatgcgtgggtccttgacaaactgaagtctgagcgtgagcgtggtatcaccatcgatattgccctctggaaattcgagactccgaagtacagtgtcactgtcattgatgctcccggccatcgtgacttcatcaagaacatgatcactggtacctcccaggctgactgcgctatcctcatcattgctgccggtactggtgagttcgaggctggtatctccaaggatggccagactcgtgagcacgctctgcttgctttcacccttggtgtgaggcaactcatcgttgccatcaacaagatggacaccaccaagtggtccgagtcccgtttcaacgaaatcatcaaggaggtttccaacttcatcaagaaggtcggatataaccccaaggctgttcccttcgtgccaatctctggtttcgagggtgacaacatgattgaaccctcccccaactgcacatggtacaagggctggaacaaggagactgcctctggcaagtcttctggtaaaacccttctcgatgccattgacgccattgaacccccaacccgtcctaccgataagcccctccgtcttcccctccaggatgtgtacaaaatctctggtattggcactgttcccgtcggacgtgttgagactggtgtcatcaagcccggtatggtcgtgactttcgctccctccaacgtcaccactgaagtcaagtccgtcgaaatgcaccaccaacaactccaggctggttaccctggcgacaacgtcggcttcaacgtcaagaacgtttcagtcaaggaagtccgccgtggcaacgttgctggcgactccaaaaatgatccccctaagggctgcgaatccttcaatgcccaggtcatcgtccttaaccaccccggccaggttggcgctggttatgccccagtcctcgactgccacactgcccacattgcttgcaagttctctgagcttattgagaagatcgaccgccgtaccggaaagtctgttgagaacaaccccaagttcatcaagtctggtgatgctgctatcgtcaagatggttccctccaagcccatgtgcgtggagcccttcactgactatccccctcttggacgtttcgctgtccgtgacatgagacaaaccgtcgctgtcggtgtcatcaagtccgtcatcaagtctgacaagactgctggcaaggtcaccaaggccgcgcagaaggccaccaagaaataa

SEQ ID NO: 1994 - DNA, 1383 bp, Neurospora crassa
atgggcaaggaggacaagactcacatcaacgtcgtcgttatcggccacgtcgattccggcaagtctaccactaccggtcacttgatctacaagtgcggtggtatcgacaagcgtaccatcgagaagttcgagaaggaagccgctgagctcggtaagggttccttcaagtatgcctgggttcttgacaagctcaaggccgagcgtgagcgtggtatcaccatcgatatcgccctctggaagttcgagactcccaagtactacgtcaccgtcatcgatgcccccggtcatcgtgatttcatcaagaacatgatcactggtacctcccaggctgattgcgctatcctcatcattgccgccggtactggtgagttcgaggctggtatctccaaggatggccagacccgtgagcacgccctgctcgcctacaccctcggtgtcaagcagctcattgttgccatcaacaagatggacaccacccagtggtcccagactcgtttcgaggagatcatcaaggagaccaagaacttcatcaagaaggttggctacaaccccgctggtgtcgctttcgtccccatctccggcttcaacggcgacaacatgcttgagccctccaccaactgcccctggtacaagggttgggagaaggagaccaaggccggcaaggccactggcaagaccctcctcgaggccatcgacgccattgagccccccaagcgtcctaccgacaagcccctccgtcttcccctccaggatgtctacaagatcggtggtatcggcacagtgcccgtcggccgtatcgagactggtgtcctcaagcccggtatggtcgttaccttcgctccttccaacgtcaccactgaagtcaagtccgtcgagatgcaccacgagcagcttgctcagggtgtccccggtgacaacgtcggcttcaacgtgaagaacgtttccgtcaaggatatccgccgtggtaacgttgccggtgactccaagaacgacccccctgctggcgccgcctctttcaccgcccaggtcatcgttctcaaccaccccggtcaggtcggtgcccgctacgcccccgtcctcgactgccacactgcccacattgcctgcaagttcgccgagctcctcgagaagatcgaccgccgtactggtaaggctgttgaggcctcccccaagttcatcaagtctggtgatgctgccatcgtcaagatgattccctccaagcccatgtgcgttgaggctttcaccgactaccctcccctcggccgtttcgccgtccgtgacatgcgtcagaccgtcgccgtcggtgtcatcaaggccgtcgacaagtccaccgctgccgctggcaaggtcaccaagtccgctgccaaggccgccaagaagtaa

SEQ ID NO: 1995 - DNA, 1383 bp, Podospora anserina
atgggcaaggaggacaagactcacatcaacgtcgtcgttatcggccacgtcgattccggcaagtcgaccaccactggtcacttgatctacaagtgcggtggtattgacaagcgtaccatcgagaagttcgagaaggaagctgctgagctcggcaagggctctttcaagtatgcctgggttcttgacaagttgaaggccgagcgtgagcgtggtatcaccatcgatattgccctctggaagttcgagacccccaagtactatgtcaccgtcattgatgcccccggccatcgtgatttcatcaagaacatgattactggtacttcccaggccgattgcgccattctcatcattgccgccggtactggtgagttcgaggctggtatctccaaggatggccagacccgtgagcacgctctcctcgcctacaccctcggtgtgaagcagctcatcgtcgccatcaacaagatggacaccaccaagtggtccgaggcccgcttcaacgagatcatcaaggagacctccaacttcatcaagaaggtcggctacaaccccaagactgttgccttcgtccccatctccggtttcaacggcgacaacatgcttgaggcttccaccaactgcccctggtacaagggctgggagaaggaggtcaagggtggcaaggccaccggcaagaccctccttgaggccatcgactccatcgagccccccaagcgtcccaccgacaagcccctccgtcttcccctccaggatgtctacaagatcggcggtatcggcacagtccctgtcggccgtatcgagactggtatcctcaagcccggtatggtcgttaccttcgctccttccaacgtcaccactgaagtcaagtccgtcgagatgcaccacgagcagctcgctgagggtgttcccggtgacaacgttggtttcaacgtgaagaacgtctccgtcaaggaaatccgccgtggcaacgttgccggtgactccaagaacgacccccccatgggcgccgcctctttcgatgcccaggtcatcgtcctcaaccaccccggccaggtcggtgctggttacgcccccgtcctcgattgccacactgcccacatcgcctgcaagttctctgagctcctgcagaagatcgaccgccgtactggtaaggccgttgaggagagccccaagttcatcaagtctggtgatgctgccatcgtcaagatggttccctccaagcccatgtgcgttgaggctttcactgagtaccctcccctcggtcgtttcgccgtccgtgacatgcgtcagaccgtcgctgtcggtgtcatcaagaaggtcgagaaggccgctgctggttccggcaaggttaccaagtccgctgccaaggctggcaagaaataa

SEQ ID NO: 1996 - DNA, 1386 bp, Podospora curvicolla
  strain VLV
atgggcaaggaggacaagactcacatcaacgtcgtcgttatcggccacgtcgattccggcaagtcgaccaccactggtcacttgatctacaagtgcggtggtattgacaagcgtaccatcgagaagttcgagaaggaagctgctgagctcggcaagggctctttcaagtatgcctgggttcttgacaagttgaaggccgagcgtgagcgtggtatcaccattgatatcgccctctggaagttcgagacccccaagtactatgtcaccgtcatcgatgcccccggccatcgtgatttcatcaagaacatgattactggtacttcccaggccgattgcgccattctcatcattgccgccggtactggtgagttcgaggctggtatctccaaggatggccagacccgtgagcacgctctcctcgcctacaccctcggtgtgaagcagctcatcgtcgccatcaacaagatggacaccaccaaatggtccgaggcccgcttcaacgagatcatcaaggagacctccaacttcatcaagaaggtcggctacaaccccaagactgttgccttcgtccccatctccggtttcaacggcgacaacatgcttgaggcttccaccaactgcccctggtacaagggttgggagaaggaggtcaagggtggcaaggctactggcaagaccctcctcgaggccatcgactccatcgagccccccaagcgtcccaccgacaagcccctccgtcttccccttcaggacgtttacaagatcggcggtatcggcacagtccctgtcggccgtatcgagactggtatcctcaagcccggtatggtcgttaccttcgccccttccaacgtcaccactgaagtcaagtccgtcgagatgcaccacgagcagctctctgagggtgtccccggtgacaacgttggtttcaacgtgaagaacgtctccgtcaaggaaatccgccgtggcaacgttgccggtgactccaagaacgacccccctcttggcgccgcttctttcgatgcccaggtcatcgtcctcaaccaccccggccaggtcggtgctggttacgcccccgtcctcgattgccacactgcccacatcgcctgcaagttcgctgagctcctgcagaagatcgatcgccgtactggtaaggctgttgaggagagccctaagttcatcaagtctggtgatgctgccatcgtcaagatgattccctccaagcccatgtgcgttgaggctttcactgagtaccctcccctcggtcgtttcgctgtccgtgacatgcgtcagaccgtcgctgtcggtgtcatcaagaaggtcgagaaggccgctgctggttccggcaaggtcaccaagtccgctgccaaggctggtggcaagaaataa

SEQ ID NO: 1997 - DNA, 1383 bp, Sordaria macrospora
  strain OOO
atgggtaaggaagacaaggctcacatcaacgtcgtcgttatcggccacgtcgattccggcaagtccaccactaccggtcacctgatctacaagtgcggtggtatcgacaagcgtaccatcgagaagttcgagaaggaagccgctgagctcggcaagggttccttcaagtatgcctgggttcttgacaagctcaaggccgagcgtgagcgtggtatcaccatcgatatcgccctctggaagttcgagactcccaagtactacgtcaccgtcatcgatgcccccggccatcgtgatttcatcaagaacatgatcactggtacctcccaggctgattgcgctattctcatcattgccgctggtactggtgagttcgaggctggtatctccaaggatggccagactcgtgagcacgctcttctcgcctacaccctcggtgtcaagcagctcatcgttgccatcaacaagatggacaccacccagtggtcccaggctcgtttcgaggagatcatcaaggagaccaagaacttcatcaagaaggtcggctacaaccccgccaccgtcgctttcgtccccatctccggcttcaacggcgacaacatgcttgaggcctccaccaactgcccctggtacaagggttgggagaaggagaccaaggccggcaagtccactggcaagaccctcctcgaggccatcgacgccattgagcagcccaagcgcccgaccgacaagcccctccgtcttcccctccaggatgtctacaagatcggcggtatcggcacagtgcccgtcggccgtatcgagactggtgtcctcaagcccggtatggtcgttaccttcgctccttccaacgtcaccactgaagtcaagtccgtcgagatgcaccacgagcagcttgctcagggtgttcccggtgacaacgtcggcttcaacgtgaagaacgtttccgtcaaggatatccgtcgtggtaacgttgccggtgactccaagaacgacccccctgtcggcgctgcctctttcaccgcccaggtcatcgtccttaaccaccccggtcaggtcggtgccggctacgctcccgtcctcgattgccacactgcccacattgcctgcaagttcgccgagctcctcgagaagatcgatcgccgtactggtaaggctgttgagacttctcccaagttcatcaagtctggtgatgctgccatcgtcaagatgattccctccaagcccatgtgcgtcgaggctttcaccgactaccctcccctcggtcgtttcgccgtccgtgacatgcgtcagaccgtcgctgtcggtgtcatcaaggccgtcgacaagacccaggctgtcgctggcaaggtcaccaagtctgctgccaaggctgccaagaagtaa

SEQ ID NO: 1998 - DNA, 1383 bp, Trichoderma reesei
  strain QM9414
atgggtaaggaggacaagactcacatcaacgtggtcgtcatcggccacgtcgactccggcaagtctaccaccactggtcacttgatctaccagtgcggtggtatcgacaagcgtaccattgagaagttcgagaaggaagccgccgaactcggcaagggttccttcaagtacgcgtgggttcttgacaagctcaaggccgagcgtgagcgtggtatcaccatcgacattgccctctggaagttcgagactcccaagtactatgtcaccgtcattgacgctcccggccaccgtgacttcatcaagaacatgatcactggtacttcccaggccgactgcgctatcctcatcatcgctgccggtactggtgagttcgaggctggtatctccaaggatggccagacccgtgagcacgctctgctcgcctacaccctgggtgtcaagcagctcatcgtcgccatcaacaagatggacactgccaactgggccgaggctcgttaccaggaaatcatcaaggagacttccaacttcatcaagaaggtcggcttcaaccccaaggccgttgctttcgtccccatctccggcttcaacggtgacaacatgctcaccccctccaccaactgcccctggtacaagggctgggagaaggagaccaaggctggcaagttcaccggcaagaccctccttgaggccatcgactccatcgagccccccaagcgtcccacggacaagcccctgcgtcttcccctccaggacgtctacaagatcggtggtatcggaacagttcccgtcggccgtatcgagactggtgtcctcaagcccggtatggtcgttaccttcgctccctccaacgtcaccactgaagtcaagtccgtcgagatgcaccacgagcagctcgctgagggccagcctggtgacaacgttggtttcaacgtgaagaacgtttccgtcaaggaaatccgccgtggcaacgttgccggtgactccaagaacgacccccccatgggcgccgcttctttcaccgcccaggtcatcgtcatgaaccaccccggccaggtcggtgccggctacgcccccgtcctcgactgccacactgcccacattgcctgcaagttcgccgagctcctcgagaagatcgaccgccgtaccggtaaggctaccgagtctgcccccaagttcatcaagtctggtgactccgccatcgtcaagatgatcccctccaagcccatgtgcgttgaggctttcaccgactaccctcccctgggtcgtttcgccgtccgtgacatgcgccagaccgtcgctgtcggtgtcatcaaggccgtcgagaagtcctctgccgccgccgccaaggtcaccaagtccgctgccaaggccgccaagaaataa

SEQ ID NO: 1999 - DNA, 29 bp, Artificial Sequence
  Synthetic DNA Sequence
catgtcaayattggtactattggtcatgt

SEQ ID NO: 2000 - DNA, 25 bp, Artificial Sequence
  Synthetic DNA Sequence
  modified_base (9): i
ccaccytcnctcamgttgaarcgtt

SEQ ID NO: 2001 - DNA, 23 bp, Artificial Sequence
  Synthetic DNA Sequence
  modified_base (6): i
  modified_base (12): i
acyacnttracngcygcyatyac

SEQ ID NO: 2002 - DNA, 21 bp, Artificial Sequence
  Synthetic DNA Sequence
  modified_base (3): i
  modified_base (15): i
ccngargaragagcnmgwggt

SEQ ID NO: 2003 - DNA, 21 bp, Artificial Sequence
  Synthetic DNA Sequence
  modified_base (9): i
catytcranrttgtcacctgg

SEQ ID NO: 2004 - DNA, 1360 bp, Candida albicans
  strain SC5314
gctgccttcgaccgttctaaacctcatgtcaacattggtactattggtcatgttgatcatggtaaaactacattgactgctgctatcaccaaagttttagccgaacaaggtggtgccaacttcttggattatggttctattgatagagctccagaagaaagagctagaggtatcactatttccactgcccacgttgaatacgaaaccaagaacagacactatgcccacgttgattgtccaggacacgctgattatatcaaaaatatgattactggtgccgctcaaatggatggtgctatcattgttgttgctgccactgatggtcaaatgcctcaaaccagagaacatttgttattggccagacaagttggtgttcaagacttggttgtgtttgtcaacaaagtcgatactattgatgaccctgaaatgttggaattagtcgaaatggaaatgagagaattgttatccacctacggttttgatggtgacaacactccagttattatgggatctgctttaatggctttggaagacaagaaaccagaaattggtaaggaagctatcttgaaattgttagatgctgtcgatgaacacattccaactccatcaagagacttggaacaaccatttttgttaccagttgaagacgtgttctccatctccggtagaggaactgttgtcactggtagagttgaaagaggtgttttgaagaagggtgaagaaatcgaaattgttggtggttttgacaaaccttacaagactactgttaccggtattgaaatgttcaaaaaagaattagactctgctatggctggtgacaactgtggtgttttgttaagaggtgttaaaagagatgaaatcaagagaggtatggttttggccaaaccaggtactgctacttctcacaagaagttcttggcttccttgtatattttgacttccgaagaaggtggtcgttccactccatttggtgaaggttacaagcctcaatgcttcttcagaactaacgatgtcactaccacattttcattcccagaaggagaaggtgttgatcattctcaaatgatcatgccaggtgacaacattgaaatggttggtgaattgatcaaatcttgtccattagaagtcaaccaacgtttcaacttgagagaaggtggtaaaactgttggtactggtttgattaccagaatcatcgaataaacagaatgtgcactgtgaataataaaaagaaaagaggtatatataggtgactttgtattttgtattgaacaataaaattctgtaaatagtaagggcctcagaagttttgatttgatttatgccatgtggacttgtagagatatccttctcaaacttcttg

SEQ ID NO: 2005 - DNA, 1342 bp, Schizosaccharomyces pombe
aagccgcatgtcaatattggtactattggtcatgttgaccacggtaaaacgacgttgacggctgctattactaaatgcctttctgatcttggtcaagctagttttatggattatagtcaaattgacaaggcccccgaggaaaaggcacgtggtattaccatttcatctgcccatgttgaatacgaaactgctaatcgtcactatgcccatgtggattgtcctggtcacgccgattacattaagaatatgattactggtgctgctacaatggatggcgctatcattgttgtttctgctaccgatggtcaaatgcctcaaactcgtgaacatttgcttctggctcgtcaagtcggtgtaaagcaaattgttgtatacatcaataaagtcgatatggtcgagcctgatatgatcgagcttgtcgaaatggaaatgcgtgagctactctccgaatacggatttgatggtgacaatactccaattgttagcggcagtgctttatgtgccttagagggtcgtgagcctgagattggtctcaatagtattactaaattgatggaagctgttgatagttatattactcttcctgaaagaaaaacggatgtccctttcttgatggccatcgaggacgttttttcaatttcaggtcgcggaactgtagtcactggccgtgtcgagcgcggtactttaaagaagggtgctgaaatcgaaatcgtcggttatggtagccatttaaagactaccgttactggaattgaaatgttcaaaaagcagcttgatgccgccgttgccggtgacaattgtggccttttacttcgttctatcaagcgagagcaattaaaacgtggaatgattgtcgctcaaccaggaaccgttgctcctcatcagaaattcaaggcatcattctatattttgacaaaagaggaaggaggtcgtcgtaccggtttcgttgacaagtatcgtccccaactgtacagtcgtacttccgacgttactgtcgaacttacccaccctgatcctaacgactcagacaaaatggttatgcctggagacaatgtcgagatgatctgtacgcttattcaccccattgtcatcgaaaaaggacaacgcttcacagttcgtgagggtggaagcactgtaggcacagctttggttactgaacttttggattagtgcatttatgaacttattggctttaaaaattttgcatgctgaataccaatattatgtcccttctcagaattctataactacagtgtcattattgtaataagacttttgcatccattgacaatggtatttgatacttttatagtttctactattgttagccaaagttataaaa

SEQ ID NO: 2006 - DNA, 18 bp, Artificial Sequence
  Synthetic DNA Sequence
tggagccggtgagcgtgg

SEQ ID NO: 2007 - DNA, 18 bp, Artificial Sequence
  Synthetic DNA Sequence
tggagccagtgagcgtgg

SEQ ID NO: 2008 - DNA, 19 bp, Artificial Sequence
  Synthetic DNA Sequence
tctggagccgatgagcgtg

SEQ ID NO: 2009 - DNA, 19 bp, Artificial Sequence
  Synthetic DNA Sequence
ctggagccagtaagcgtgg

SEQ ID NO: 2010 - DNA, 861 bp, Klebsiella pneumoniae
  strain KMK107
atgagtattcaacattttcgtgtcgcccttattcccttttttgcggcattttgccttcctgtttttgctcacccagaaacgctggtgaaagtaaaagatgctgaagatcagttgggtgcacgagtgggttacatcgaactggatctcaacagcggtaagatccttgagagttttcgccccgaagaacgttttccaatgatgagcacttttaaagttctgctatgtggtgcggtattatcccgtgttgacgccgggcaagagcaactcggtcgccgcatacactattctcagaatgacttggttaagtactcaccagtcacagaaaagcatcttacggatggcatgacagtaagagaattatgcagtgctgccataaccatgagtgataacactgctgccaacttacttctgacaacgatcggaggaccgaaggagctaaccgcttttttgcacaacatgggggatcatgtaactcgccttgatcgttgggaaccggagctgaatgaagccataccaaacgacgagcgtgacaccacgacgcctgcagcaatggcaacaacgttgcgcaaactattaactggcgaactacttactctagcttcccggcaacaattaatagactggatggaggcggataaagttgcaggaccacttctgcgctcggcccttccggctggctggtttattgctgataaatctggagccagtgagcgtgggtctcgcggtatcattgcagcactggggccagatggtaagccctcccgtatcgtagttatctacacgacggggagtcaggcaactatggatgaacgaaatagacagatcgctgagataggtgcctcactgattaagcattggtaa

SEQ ID NO: 2011 - DNA, 861 bp, Klebsiella pneumoniae
  strain CLSiS L-491
atgagtattcaacatttccgtgtcgcccttattcccttttttgcggcattttgctttcctgtttttgctcacccagaaacgctggtgaaagtaaaagatgctgaagatcagttgggtgcacgagtgggttacatcgagctggatctcaacagcggtaagatccttgagagttttcgccccgaagaacgttttccaatgatgagcacttttaaagttctgctatgtggtgcggtattatcccgtgttgacgccgggcaagagcaactcggtcgccgcatacactattctcagaatgacttggttgagtactcaccagtcacagaaaagcatcttacggatggcatgacagtaagagaattatgcagtgctgccataaccatgagtgataacactgcggccaacttacttctgacaacgatcggaggaccgaaggagctaaccgcttttttgcacaacatgggggatcatgtaacccgccttgatcgttgggaaccggagctgaatgaagccataccaaacgacgagcgtgacaccacgatgcctgcagcaatggcaacaacgttgcgcaaactattaactggcgaactacttactctagcttcccggcaacaattaatagactggatggaggcggataaagttgcaggaccacttctgcgctcggcccttccggctggctggtttattgctgataaatctggagccagtaagcgtggatctcgcggtatcattgcagcactggggccagatggtaagccctcccgtatcgtagttatctacatgacggggagtcaggcaactatggatgaacgaaatagacagatcgctgagataggtgcctcactgattaagcattggtaa

SEQ ID NO: 2012 - DNA, 49 bp, Artificial Sequence
  Synthetic DNA Sequence
  modified_base (29): n = guanidyl-MR-HEG
ccgcggattattaaaccgcccttccgcgnatgtcagagggatagatcca

SEQ ID NO: 2013 - DNA, 353 bp, Kluyvera ascorbata
  ref <308>: DATABASE ACCESSION NUMBER: ATCC 33433
agcttaagaactcttatctggattacgcgatgtcggtcattgttggccgtgcgctgccggatgtccgagatggcctgaagccggtacaccgtcgcgtactttacgccatgaacgtattgggcaatgactggaacaaagcctacaaaaaatcagcccgtgtcgtgggtgacgtgatcggtaaatatcacccgcatggtgatactgccgtctatgacactatcgtccgtatggcacagccattctcactgcgatacatgctggtagatggtcaaggtaacttcggttctgtcgatggcgactccgccgcagcgatgcgttatacggaaatccgtatgtcgaaaatcgcccatgag

SEQ ID NO: 2014 - DNA, 355 bp, Kluyvera georgiana
  ref <308>: DATABASE ACCESSION NUMBER: ATCC 51603
agctcctatctggattatgcgatgtcggtcattgttggccgtgcgctgccagatgtccgagatggcctgaagccggtacaccgtcgcgtactttacgccatgaacgtactaggcaatgactggaacaaagcctataaaaaatctgcccgtgtcgttggtgacgtaatcggtaaataccatccccatggtgactcggcggtctatgacacgatcgtccgcatggcgcagccattctcgctgcgttatatgctggtagacggtcagggtaacttcggttctatcgacggcgactctgcggcggcaatgcgttatacggaaatccgtctggcgaaaattgcccatgaactgatggccg

SEQ ID NO: 2015 - DNA, 22 bp, Artificial Sequence
  Synthetic DNA Sequence
ccaagaagctcaaaaacatctg

SEQ ID NO: 2016 - DNA, 20 bp, Artificial Sequence
  Synthetic DNA Sequence
tadcctgtccawacagccat

SEQ ID NO: 2017 - DNA, 22 bp, Artificial Sequence
  Synthetic DNA Sequence
actttgaataaggtcggtctag

SEQ ID NO: 2018 - DNA, 22 bp, Artificial Sequence
  Synthetic DNA Sequence
acactaaacaaggttggtttag

SEQ ID NO: 2019 - DNA, 22 bp, Artificial Sequence
  Synthetic DNA Sequence
acactaaacaaggtcggtctag

SEQ ID NO: 2020 - DNA, 22 bp, Artificial Sequence
  Synthetic DNA Sequence
gtagctccagatgaaatgtttg

SEQ ID NO: 2021 - DNA, 22 bp, Artificial Sequence
  Synthetic DNA Sequence
gtagctccagacgaaatgtttg

SEQ ID NO: 2022 - DNA, 22 bp, Artificial Sequence
  Synthetic DNA Sequence
gtagctccagatgaaacgtttg

SEQ ID NO: 2023 - DNA, 22 bp, Artificial Sequence
  Synthetic DNA Sequence
gtaactccagatgaaatgtttg

SEQ ID NO: 2024 - DNA, 20 bp, Artificial Sequence
  Synthetic DNA Sequence
agtgaaaagatggctgctgc

SEQ ID NO: 2025 - DNA, 20 bp, Artificial Sequence
  Synthetic DNA Sequence
agtgagaaaatggctgctgc

SEQ ID NO: 2026 - DNA, 23 bp, Artificial Sequence
  Synthetic DNA Sequence
tccaagcatgcattatgcaaacg

SEQ ID NO: 2027 - DNA, 23 bp, Artificial Sequence
  Synthetic DNA Sequence
tcggtctagatagagctaaaacg

SEQ ID NO: 2028 - DNA, 20 bp, Artificial Sequence
  Synthetic DNA Sequence
tatgctcttcaacaatcacg

SEQ ID NO: 2029 - DNA, 22 bp, Artificial Sequence
  Synthetic DNA Sequence
agccgttgagactttgaataag

SEQ ID NO: 2030 - DNA, 19 bp, Artificial Sequence
  Synthetic DNA Sequence
cttaatggtcttggtatcg

SEQ ID NO: 2031 - DNA, 22 bp, Artificial Sequence
  Synthetic DNA Sequence
cgtgactggggttctgctatga

SEQ ID NO: 2032 - DNA, 22 bp, Artificial Sequence
  Synthetic DNA Sequence
cgtgactggggatcatcaatga

SEQ ID NO: 2033 - DNA, 22 bp, Artificial Sequence
  Synthetic DNA Sequence
cgtgactggggttctgccatga

SEQ ID NO: 2034 - DNA, 22 bp, Artificial Sequence
  Synthetic DNA Sequence
atcaagaacactggctatgtag

SEQ ID NO: 2035 - DNA, 22 bp, Artificial Sequence
  Synthetic DNA Sequence
atcaagaacactggctacgtag

SEQ ID NO: 2036 - DNA, 22 bp, Artificial Sequence
  Synthetic DNA Sequence
atcaagaacactggttacgtag

SEQ ID NO: 2037 - DNA, 22 bp, Artificial Sequence
  Synthetic DNA Sequence
atcaaaaatactggttatgtag

SEQ ID NO: 2038 - DNA, 22 bp, Artificial Sequence
  Synthetic DNA Sequence
atcaagaatactggctacgtag

SEQ ID NO: 2039 - DNA, 22 bp, Artificial Sequence
  Synthetic DNA Sequence
atcaaaaacactggctatgtag

SEQ ID NO: 2040 - DNA, 19 bp, Artificial Sequence
  Synthetic DNA Sequence
tgtgaccccagacaaaccc

SEQ ID NO: 2041 - DNA, 20 bp, Artificial Sequence
  Synthetic DNA Sequence
gttgagcggcagcactatct

SEQ ID NO: 2042 - DNA, 20 bp, Artificial Sequence
  Synthetic DNA Sequence
cacggggatttctctattta

SEQ ID NO: 2043 - DNA, 20 bp, Artificial Sequence
  Synthetic DNA Sequence
cacggggattactctattta

SEQ ID NO: 2044 - DNA, 20 bp, Artificial Sequence
  Synthetic DNA Sequence
accgtaagtcggccaagtca

SEQ ID NO: 2045 - DNA, 19 bp, Artificial Sequence
  Synthetic DNA Sequence
gttctttctccgtatcgtc

SEQ ID NO: 2046 - DNA, 20 bp, Artificial Sequence
  Synthetic DNA Sequence
acggggatttttctatctat

SEQ ID NO: 2047 - DNA, 2160 bp, Streptococcus pneumoniae
  strain CS109
atgaacaaaccaacgattctgcgcctaatcaagtatctgagcattagcttcttaagcttggttatcgcagccattgtcttaggcggaggagtttttttctactatgttagcaaggctcctagcctatccgagagtaaactagttgcaacaacctctagtaaaatctacgacaataaaaatcaactcattgctgacttgggttctgaacgccgcgtcaatgcccaagctaatgatattcccacagatttggttaaggcaatcgtttctatcgaagaccatcgcttcttcgaccacagggggattgataccatccgtatcctgggagctttcttgcgcaatctgcaaagcaattccctccaaggtggatcaactctcacccaacagttgattaaattgacttacttttcaacctcgacttccgaccagactatttctcgtaaggctcaggaagcttggttagcgattcagttagaacaaaaagcaaccaaacaggaaatcttgacctactatataaataaggtctacatgtctaatggcaactatggaatgcagacagcagctcaaaactactatggtaaagacctcaataatttaagtttacctcagttagccttgctggctggaatgcctcaggcaccaaaccaatatgacccctattcacatccagaagcagcccaagaccgccgaaacttggtcttatctgaaatgaaaaatcaaggttacatctctgctgaacagtatgagaaagcagtcaatacaccaattactgatggactacaaagtctcaaatcagcaagtaattaccctgcttacatggataattacctcaaggaagtcatcaatcaagttgaagaagaaactggctataaccttctaactactgggatggatgtttacacaaatgtagaccaagaagctcaaaaacatctgtgggatatctacaactccgatcaatacgtctcttaccctgacgatgatttgcaagtcgcatctacggtcgtagatgtttcaaatggtaaagtcatcgcacaacttggtgctcgtcatcaagcaagtaatgtttcattcggtaccaaccaggccgtagaaaccaatcgtgactggggatcatcaatgaaaccaatcactgactatgctcccgctttagaatatggagtctatgactctactgcttctattgtacatgatgtcccttataactatcctggcactgatactccactctacaactgggatcatgtctactttggaaacattacaatccagtatgctcttcaacaatcacgaaatgtcacagccgttgagactttgaataaggtcggtctagatagagctaaaaccttccttaatggtcttggtatcgactatccaagcatgcattatgcaaacgccatttcaagtaacacaactgaatccaacaaaaaatatggtgcaagtagtgaaaaaatggctgctgcctacgctgcttttgctaatggtggtatttatcacaaaccaatgtatatcaataaaatcgtctttagtgatggtagcgaaaaagaattttctgatgctggtacacgagctatgaaagagactactgcctatatgatgactgaaatgatgaaaactgttttaacttacggaacaggacgtggagcctacctaccatggcttccacaagcaggtaagacaggtacttctaactatactgacgaagaaattgaaaagtatatcaagaacactggttacgtagctccagatgaaatgtttgtagggtatacccgtaaatatgcaatggctgtttggacaggatactcaaatcgtctaactccaatcatcggagatggtttccttgttgctggtaaagtctatcgttcaatgataacttacctttctgaagatgaccaacctggagattggacaatgccagatggcttgtatagaaatggagaattcgtatttaaaaatggtgctcgttctacgtggagctcacctgctccacaacaacccccatcaactgaaagttcaagctcatcatcagatagttcaacttcacagtctaactcaaccactccaagcacaaataatagtacgactaccaatcctaacaataatacgcaacaatcaaatacaacccctgatcaacaaaatcagaatcctcaaccagcacaaccataa

SEQ ID NO: 2048 - DNA, 2160 bp, Streptococcus pneumoniae
  strain R6
atgaacaaaccaacgattctgcgcctaatcaagtatctgagcattagcttcttaagcttggttatcgcagccattgtcttaggcggaggagtttttttctactacgttagcaaggctcctagcctatccgagagtaaactagttgcaacaacttctagtaaaatctacgacaataaaaatcaactcattgctgacttgggttctgaacgccgcgtcaatgcccaagctaatgatattcccacagatttggttaaggcaatcgtttctatcgaagaccatcgcttcttcgaccacagggggattgataccatccgtatcctgggagctttcttgcgcaatctgcaaagcaattccctccaaggtggatcagctctcactcaacagttgattaagttgacttacttttcaacttcgacttccgaccagactatttctcgtaaggctcaggaagcttggttagcgattcagttagaacaaaaagcaaccaagcaagaaatcttgacctactatataaataaggtctacatgtctaatgggaactatggaatgcagacagcagctcaaaactactatggtaaagacctcaataatttaagtttacctcagttagccttgctggctggaatgcctcaggcaccaaaccaatatgacccctattcacatccagaagcagcccaagaccgccgaaacttggtcttatctgaaatgaaaaatcaaggctacatctctgctgaacagtatgagaaagcagtcaatacaccaattactgatgggctacaaagtctcaaatcagcaagtaattaccctgcttacatggataattacctcaaggaagtcatcaatcaagttgaagaagaaacaggctataacctactcacaactgggatggatgtctacacaaatgtagaccaagaagctcaaaaacatctgtgggatatttacaatacagacgaatacgttgcctatccagacgatgaattgcaagtcgcttctaccattgttgatgtttctaacggtaaagtcattgcccagctaggagcacgccatcagtcaagtaatgtttccttcggaattaaccaagcagtagaaacaaaccgcgactggggatcaactatgaaaccgatcacagactatgctcctgccttggagtacggtgtctacgagtcaactgccactatcgttcacgatgagccctataactaccctgggacaaatacccctgtttataactgggataggggctactttggcaacatcaccttgcaatacgccctgcaacaatcgcgaaacgtcccagccgtggaaactctaaacaaggtcggactcaaccgcgccaagactttcctaaatggtctcggaatcgactacccaagtattcactactcaaatgccatttcaagtaacacaaccgaatcagacaaaaaatatggagcaagtagtgaaaagatggctgctgcttacgctgcctttgcaaatggtggaacttactataaaccaatgtatatccataaagtcgtctttagtgatgggagtgaaaaagagttctctaatgtcggaactcgtgccatgaaagaaacgacagcctatatgatgaccgacatgatgaaaacagtcttgagttatggaactggacgaaatgcctatcttgcttggctccctcaggctggtaaaacaggaacctctaactatacagacgaggaaattgaaaaccacatcaagacctctcaatttgtagcacctgatgaactatttgctggctatacgcgtaaatattcaatggctgtatggacaggctattctaaccgtctgacaccacttgtaggcaatggccttacggtcgctgccaaagtttaccgctctatgatgacctacctgtctgaaggaagcaatccagaggattggaatataccagaggggctctacagaaatggagaattcgtatttaaaaatggtgctcgttctacgtggagctcacctgctccacaacaacccccatcaactgaaagttcaagctcatcatcagatagttcaacttcacagtctagctcaaccactccaagcacaaataatagtacgactaccaatcctaacaataatacgcaacaatcaaatacaacccctgatcaacaaaatcagaatcctcaaccagcacaaccataa

SEQ ID NO: 2049 - DNA, 2160 bp, Streptococcus pneumoniae
  strain URU-E159
atgaacaaaccaacgattctgcgcctaatcaagtatctgagcattagcttcttaagcttggttatcgcagccattgtcttaggcggaggagtttttttctactacgttagcaaggctcctagcctatccgagagtaaactagttgcaacaacttctagtaaaatctacgacaataaaaatcaactcattgctgacttgggttctgaacgccgcgtcaatgcccaagctaatgatattcccacagatttggttaaggcaatcgtttctatcgaagaccatcgcttcttcgaccacagggggattgattccatccgtatcctgggagctttcttgcgcaatctgcaaagtaattccctccaaggtggatcaactctcacccaacagttgattaagttgacttacttttcaacctcgacttccgaccagactatttctcgtaaggctcaggaagcttggttagcgattcagttagaacaaaaagcaaccaaacaggaaatcttgacctactatataaataaggtctacatgtctaatggcaactatggaatgcagacagcagctcaaaactactatggtaaagacctcaataatttaagtttacctcagttagccttgctggctggaatgcctcaggcaccaaaccaatatgacccctattcacatccagaagcagcccaagaccgccgaaacttggtcttatctgaaatgaaaaatcaaggttacatctctgctgaacagtatgagaaagcagtcaatacaccaattactgatggactacaaagtctcaaatcagcaagtaattaccctgcttacatggataattacctcaaggaggtcatcaatcaagtagaacaagaaactggctataaccttctaactactgggatggatgtttacacaaatgtagaccaagaagctcaaaaacatctgtgggatatctacaactccgatcaatacgtctcttaccctgacgatgatttgcaagtcgcatctacggtcgtagatgtttcaaatggtaaagtcatcgcccaacttggagctcgtcaccaagcaagtaacgtttcatttggtaccaaccaagctgtggaaaccaatcgtgactggggttctgctatgaaaccaatcaccgattatgcacctgccatagaatacggtgtttatgattccactgcaactatggttaatgatattccttataactatccgggaacaagcacacctgtctacaactgggatagagcatatttcggtaatattactctgcaatatgctcttcaacaatcacgaaatgtcacagccgttgagactttgaataaggtcggtctagatagagctaaaaccttccttaatggtcttggtatcgactatccaagcatgcattatgcaaacgccatttcaagtaatacaacagaatctaataaacaatacggagcaagtagtgaaaaaatggctgctgcttatgctgcctttgcaaatggtggcacttactataaaccaatgtatatccataaagtcgtcttcagtgatggaagtaaaaaagagttctctaatgtcggaactcgtgccatgaaggaaacgacagcctatatgatgaccgacatgatgaaaacagtcttgacttatggaactgggcgtggagcctatcttccttggcttcctcaagctggtaaaacaggaacctctaactatacagatgaggaagttgaaaaccacatcaagaacactggctatgtagctccagatgaaatgtttgttggttatactcgtaagtattctatggctgtatggacaggttattcgaatcgtttaactcctatcgttggagatggtttcctagttgcagctaaagtttatcgctcaatgataacgtatctatcagaagatactcatccagaagactggacgatgccagacggacttttcagaaatggagaattcgtatttaaaaatggtgctcgttctacgtggaactcacctgctccacaacaacccccatcaactgaaagttcaagctcatcatcagatagttcaacttcacagtctagctcaaccactccaagcacaaataatagtacgactaccaatcctaacaataatacgcaacaatcaaatacaacccctgatcaacaaaatcagaatcctcaaccagcacaaccataa

SEQ ID NO: 2050 - DNA, 930 bp, Streptococcus pneumoniae
  strains 8303; 35193
ctgtgggatatctacaactccgatcaatacgtctcttaccctgacgatgatttgcaagtcgcatctacggtcgtagatgtttcaaatggtaaagtcatcgcccaacttggagctcgtcaccaagcaagtaacgtttcatttggtaccaaccaagctgtggaaaccaatcgtgactggggttctgctatgaaaccaatcaccgattatgcacctgccatagaatacggtgtttatgattccactgcaactatggttaatgatattccttataactatccgggaacaagcacacctgtctacaactgggatagagcatatttcggtaatattactctgcaatatgctcttcaacaatcacgaaatgtcacagccgttgagactttgaataaggtcggtctagatagagctaaaaccttccttaatggtcttggtatcgactatccaagcatgcattatgcaaacgccatttcaagtaatacaacagaatctaataaacaatacggagcaagtagtgaaaaaatggctgctgcttatgctgcctttgcaaatggtggcacttactataaaccaatgtatatccataaagtcgtcttcagtgatggaagtaaaaaagagttctctaatgtcggaactcgtgccatgaaggaaacgacagcctatatgatgaccgacatgatgaaaacagtcttgacttatggaactgggcgtggagcctatcttccttggcttcctcaagctggtaaaacaggaacctctaactatacagatgaggaagttgaaaaccacatcaagaacactggctatgtagctccagatgaaatgtttgttggttatactcgtaagtattctatggctgtatggacaggttattcgaatcgtttaactcctatcgttggagatggtttcctagttgcagctaaagtttatcgc

SEQ ID NO: 2051 - DNA, 930 bp, Streptococcus pneumoniae
  strains 63509; M11
ctgtgggatatttacaatacagacgaatacgttgcctatccagatgatgacatgcaagtagcttcgactattgtagatgtatctaatggtaacgttattgcacaacttggtgctcgtcatcaagcaagtaatgtttcattcggcaccaaccaggctgtggagaccaatcgtgactggggttcttctatgaaaccaatcactgactatgctcccgctttagaatatggagtctatgactctactgcttctattgtacatgatgttccttataactatcctggcactgatactccagtctacaactgggatcatgtctactttggaaacattacaatccagtatgctcttcaacaatcacgaaatgtcacagccgttgagactttgaataaggtcggtctagatagagctaaaaccttccttaatggtcttggtatcgactatccaagcatgcattatgcaaacgccatttcaagtaacacaactgaatccaacaaacagtacggtgcaagtagtgaaaagatggctgctgcttatgccgccttttctaatggtggtatttaccacaaaccaatgtatatcaataaaatcgtcttcagtgatggtagtgaaaaagaattttctgatgctggtacacgagctatgaaagaaactactgcctatatgatgaccgaaatgatgaaaactgttttagcttacggaaccggacgtggtgcttacctaccatggcttccacaagcaggtaagacaggtacttctaactatactgacgacgaaattgaaaagtatatcaagaacactggctacgtagctccagatgaaatgtttgttggttatactcgtaagtattctatggctgtatggactggttactcaaatcgtttaactccaatcgtaggagatggtttcctagttgctgctaaggtttatcgc

SEQ ID NO: 2052 - DNA, 1195 bp, Streptococcus pneumoniae
  strain #22/HA5
gtctcttaccctgacgatgatttgcaagtcgcatctacggtcgtagatgtttccaatggtaaagtcatcgcccaacttggagctcgtcaccaagcaagtaacgtttcatttggtaccaaccaagctgtggaaaccaatcgtgactggggttcaacaatgaaaccaatcaccgattatgcacctgccatagaatacggtgtatatgattccactgcaactatggttaatgatattccttataactatccgggaacaagcacacctgtctacaactgggatcgagcatattttggtaatattactctgcaatatgcccttcaacaatcacgtaatgttacagcagttgaaacattaaacaaggttggtttagatcgagccaaaactttcctaaatggcttaggtatcgattacccaagcatacactatgctaacgccatttcaagtaatacaacagaatctaacaaacattacggtgcaagtagtgaaaaaatggctgctgcttatgccgcctttgctaatggtggtatttaccacaaaccaatgtatatcaataaaatcgtctttagtgatggtagtgagaaagaattttctgatgctggtacacgagctatgaaagaaactactgcctatatgatgaccgaaatgatgaaaactgttttagcttacggaaccggacgtggtgcttacctaccatggcttccacaagcaggtaagacaggtacttctaactatactgatgacgaaatcgaaaaacatatcaagaatactggctacgtagctccagatgaaatgtttgtaggctatactcgtaagtattctatggctgtatggactggttactcaaatcgtttaactccaattgttggagatggtttcctagttgctgctaaggtttatcgctcaatgatatcgtatctatcagaagatgaccaacctggagattggacgatgccagacggcctgttccgaaatggagaattcgtatttaaaaatggtgctcgttctacgtggaactcacctgctccacaacaacccccatcaactgaaagttcaagctcatcatcagatagttcaacttcacagtctagctcaaccactccaagcacaaataatagtacgactaccaatcctaacaataatacgcaacaatcaaatacaacccctgatcaacaaaatcagaatcctcaaccagcac

SEQ ID NO: 2053 - DNA, 930 bp, Streptococcus pneumoniae
  strain 17619
ctgtgggatatttacaatacagacgaatacgttgcctatccagacgatgaattgcaagtcgcttctaccattgttgatgtttctaacggtaaagtcattgcccagctaggagcacgccatcagtcaagtaatgtttccttcggaattaaccaagcagtagaaacaaaccgcgactggggatcaactatgaaaccgatcacagactatgctcctgccttggagtacggtgtctacgattcaactgctactatcgttcacgatgagccctataactaccctgggacaaatactcctgtttataactgggataggggctactttggcaacatcaccttgcaatacgccctgcaacaatcgcgaaacgtcccagccgtggaaactctaaacaaggtcggactcaaccgcgccaagactttcctaaatggtctcggaatcgactacccaagtattcactactcaaatgccatttcaagtaacacaaccgaatcagacaaaaaatatggagcaagtagtgaaaagatggctgctgcttacgctgcctttgcaaatggtggaacttactataaaccaatgtatatccataaagtcgtctttagtgatgggagtgaaaaagagttctctaatgtcggaactcgtgccatgaaggaaacgacagcctatatgatgaccgaaatgatgaaaacagtcttgagttatggaactggacgaaatgcctatcttgcttggcttcctcaagctggtaaaacaggtacctctaactatacagatgaagaaattgaaaaacacatcaaaaacactggctatgtagctccagatgaaacgtttgttggttatactcgtaagtattctatggctgtatggacaggttacacaaaccgtctcacaccaattgtgggggatggcttcacagttgctgccaaagtttaccgc

SEQ ID NO: 2054 - DNA, 306 bp, Streptococcus pneumoniae
  strain R6
cgtcgcattctctacggaatgaatgaattgggtgtgaccccagacaaaccccataaaaaatctgctcgtattacaggggatgtcatgggtaaataccacccacacggggattcctctatttatgaagccatggtccgtatggctcaatggtggagctaccgttacatgcttgtagatggtcatgggaattttggttccatggatggagatagtgctgccgctcaacgttataccgaggcacgtatgagcaagattgctctggaaatgcttcgtgatatcaacaaaaatacagttgatttcgttgat

SEQ ID NO: 2055 - DNA, 2472 bp, Streptococcus pneumoniae
  strain 7785
atgtctaacattcaaaacatgtccctggaggacatcatgggagagcgctttggtcgctactccaagtacattattcaagaccgggctttgccagatattcgtgatgggttgaagccggttcagcgccgtattctttattctatgaataaggatagcaatacttttgacaagagctaccgtaagtcggccaagtcagtcgggaacatcatggggaatttccacccacacggggattcttctatctatgatgccatggttcgtatgtcacagaactggaaaaatcgtgagattctagttgaaatgcacggtaataacggttctatggacggagatcctcctgcggctatgcgttatactgaggcacgtttgtctgaaattgcaggctaccttcttcaggatatcgagaaaaagacagttccttttgcatggaactttgacgatacggagaaagaaccaacggtcttgccagcagcctttccaaacctcttggtcaatggttcgactgggatttcggctggttatgccacagacattcctccccataatttagctgaggtcatagatgctgcagtttacatgattgaccacccaactgcaaagattgataaactcatggaattcttacctggaccagacttccctacaggggctattattcagggtcgtgatgaaatcaagaaagcttatgagactgggaaagggcgcgtggttgttcgttccaagactgaaattgaaaagctaaaaggtggtaaggaacaaatcgttattactgagattccttatgaaatcaataaggccaatctagtcaagaaaatcgatgatgttcgtgttaataacaaggtagctgggattgctgaggttcgtgatgagtctgaccgtgatggtcttcgtatcgctatcgaacttaagaaagacgctaatactgagcttgttctcaactacttatttaagtacaccgacctacaaatcaactacaactttaatatggtggcgattgacaatttcacacctcgtcaggttgggattgttccaatcctgtctagctacatcgctcaccgtcgagaagtgattttggcgcgttcacgctttgacaaagaaaaggctgagaaacgtctccatatcgtcgaaggtttgattcgtgtgatttcgattttggatgaagtcattgctcttatccgtgcttctgagaataaggcggacgccaaggaaaacctcaaagttagctatgattttacggaagaacaggctgaggctatcgtaactttgcaactgtaccgtttgaccaataccgatgtggttgtcttgcaggaagaagaagcagagcttcgtgagaagattgctatgctggcggctattatcggtgatgaaaggactatgtacaatctcatgaagaaagaacttcgtgaggtcaagaagaaatttgcaactcctcgtttgagttctttagaagacactgcgaaagcaattgagattgatacagctagtcttatcgctgaggaagatacctacgtcagcgtgaccaaggcaggttacatcaagcgtaccagtccacgttcctttgcggcttccaccttggaagaaattggcaagcgtgatgatgaccgtttgatttttgttcaatctgccaagacaacccagcacctcttgatgttcacaagtcttggaaatgtcatctacagaccaatccatgagttggcagatattcgttggaaggacatcggagagcatctgagccaaaccatcacaaactttgaaacgaatgaagaaatcctttatgtggaagtactggatcagtttgacgatgcgacaacctactttgcagtgactcgccttggtcaaatcaaacgggtagagcgaaaagaattcactccatggcggacctatagatctaagtctgtcaagtatgctaagctcaaagacgatacagatcagattgtagcagtggctccgattaaactagatgatgttgtcttggttagtcaaaatggttatgccctgcgtttcaatatcgaagaggttccggttgtcggtgctaaggcagcaggtgtcaaggctatgaatttgaaagaagatgatgtcctccaatctggctttatctgtaatacttcgtccttctacctcttgacccagcgtggaagcttgaaacgtgtttctattgaggaaattctagcaaccagccgtgccaaacgaggattacaagtcttgcgtgagttgaaaaacaaaccgcatcgtgtcttcttggcaggagcagttgcagagcaaggatttgttggcgatttcttcagtacggaagtggatgtgaacgaccaaactctgcttgtccaatccaataaaggaacaatctatgaaagccgattgcaagacttgaacttgtcagaacgcactagcaatggaagcttcatttctgacacgatttcagatgaagaagtttttgacgcttatcttcaggaagtagttactgaagataaataa

SEQ ID NO: 2056 - DNA, 1212 bp, Streptococcus pneumoniae
  strain StrR-16
aagctcaaaaacatctgtgggatatctacaactccgatcaatacgtctcttaccctgacgatgatttgcaagtcgcatctacggtcgtagatgtttcaaatggtaaagtcattgcccaacttggagctcgtcaccaagcaagtaacgtttcatttggcaccaaccaagctgtggaaaccaatcgtgactggggttcaacaatgaaaccaatcacagactatgctcctgccttggaatacggtgtctacgattcaactgctactatcgttcacgatgagccctataactatcctgggacagatacccctgtctataactgggataggggctactttggcaatatcaccttgcaatacgccctgcaacaatcgcgaaacgtcccagccgtggaaacactaaacaaggtcgggctcaaccgcgccaagacttttctaaatggtctcggaatcgactacccaagtattcactactcaaatgccatttcaagtaacacaaccgagtcagacaaaaaatatggagcaagtagtgaaaagatggctgctgcttacgctgcctttgcaaatggtggaacttactataaaccaatgtatatccataaagtcgtctttagtgatggaagtgaaaaagagttctctaatgtcggaactcgcgccatgaaagaaacgactgcttacatgatgacagaaatgatgaaaacagtcttgacgtacggaattggtcgtggtgcctacctgccttggcttcctcaagctggtaaaacaggtacttctaactatactgacgaagaaattgaaaagtatatcaagaacactggttacgtaactccagatgaaatgtttgtagggtatacccgtaaatatgcaatggctgtatggacaggctattctaaccgtctgacaccacttgtaggcgatggccttacggtcgctgccaaggtttaccgctctatgatgacctacctgtctgaaggaagcaatccagaggattggaatataccagaggggctctacagaaatggagaattcgtatttaaaaatggtgctcgttctacgtggagctcacctgctccacaacaacccccatcaactgaaagttcaagctcatcatcagatagttcaacttcacagtctagctcaaccactccaagcacaaataatagtacgactaccaatcctaacaataatacgcaacaatcaaatacaacccctgatc

SEQ ID NO: 2057 - DNA, 1242 bp, Streptococcus pneumoniae
  strain StrR-17
atgtagaccaagaagctcaaaaacatctgtgggatatttacaatacagacgaatacgttgcctatccagacgatgaattgcaagtcgcttctaccattgttgatgtttctaacgggaaagttattgctcagttaggttctcgtcaccaatcaagcaatgtttccttcggaatcaaccaagctgttgaaaccaaccgtgactggggttctgccatgaagccaatcacagactatgctcctgccttagagtatgacatctacgactcaactgcttcgattgtacatgatgttccttataactatccaggtactgatactcccctctacaactgggataaagtctactttggaaatattacaatccagtatgcacttcaacagtcacgtaatgtcacagccgttgagactttgaataaggtcggtctagatagagctaaaacctttcttaatggtcttggtatcgactatccaagcatgcattatgcaaacgccatttcaagtaatacgactgagtcaaacaaaaagtacggagcaagtagtgagaaaatggctgctgcttacgctgcttttgctaacggtggtatctaccataaaccaatgtatatcaacaaaatcgtctttagcgatggtagctcaaaagaatacgctgatcctggtactcgtgccatgaaagagacgaccgcctatatgatgacagaaatgatgaagactgtcttggcatacggaacgggtcgtggtgcttatctcccttggctacctcaagctggtaagactggtacatcaaactatacagatgatgaaattgaaaactacatcaaaaatactggttatgtagctccagacgaaatgtttgttggttatactcgcaaatattcaatggcggtatggacaggttactcaaaccgcctgactcctatcgttggtgatggcttctatgttgcagctaaggtttaccgttcaatgatgacttatctgtctgaggataacaaccctggcgactggactatgccagaaggtctctatcgaagtggtgagttcgtctttaaaaaaggtgctcgttctgcatggactgctcctgctccgcaacaggccccaacaccagaaagttcgagctcgacatcagaaagttcaacttcacagtcaagctcaactactccaagcacgaataatagtgcaaacaataataccaataaccagcaaccaaatacaacgcctggtcaacaaaaccagaaccaaaatcaga

SEQ ID NO: 2058 - DNA, 1225 bp, Streptococcus pneumoniae
  strain StrR-18
gaagctcaaaaacatctgtgggatatttacaatacagacgaatacgttgcctatccagacgatgaattgcaagtcgcttctaccattgttgatgtttctaacgggaaagttattgctcagttaggttctcgtcaccaatcaagcaatgtttccttcggaatcaaccaagctgttgaaaccaaccgtgactggggttctgccatgaagccaatcacagactatgctcctgccttagagtatgacatctacgactcaactgcttcgattgtacatgatgttccttataactatccaggtactgatactcccctctacaactgggataaagtctactttggaaatattacaatccagtatgcacttcaacagtcacgtaatgtcacagccgttgagactttgaataaggtcggtctagatagagctaaaacctttcttaatggtcttggtatcgactatccaagcatgcattatgcaaacgccatttcaagtaatacgactgagtcaaacaaaaagtacggagcaagtagtgagaaaatggctgctgcttacgctgcttttgctaacggtggtatctaccataaaccaatgtatatcaacaaaatcgtctttagcgatggtagctcaaaagaatacgctgatcctggtactcgtgccatgaaagagacgaccgcctatatgatgacagaaatgatgaagactgtcttggcatacggaacgggtcgtggtgcttatctcccttggctacctcaagctggtaagactggtacatcaaactatacagatgatgaaattgaaaactacatcaaaaatactggttatgtagctccagacgaaatgtttgttggttatactcgcaaatattcaatggcggtatggacaggttactcaaaccgcctgactcctatcgttggtgatggcttctatgttgcagctaaggtttaccgttcaatgatgacttatctgtctgaggataacaaccctggcgactggactatgccagaaggtctctatcgaagtggtgagttcgtctttaaaaaaggtgctcgttctgcatggactgctcctgctccgcaacaggccccaacaccagaaagttcgagctcgacatcagaaagttcaacttcacagtcaagctcaactactccaagcacgaataatagtgcaaacaataataccaataaccagcaaccaaatacaacgcctggtcaacaaaaccagaaccaaa

SEQ ID NO: 2059 - DNA, 554 bp, Streptococcus pneumoniae
  strain StrR-38
tggctactttggaaacattacagtccagtatgctcttcaacaatcacgaaatgtcacagccgttgagactttgaataaggtcggtctagatagagctaaaaccttcctcaatggacttggtatcgattatccaagcatgctttatgcaaacgccatttcaagtaacacaactgaatccaacaaaaagtacggagcaagtagtgaaaaaatggccgctgcctacgcagcttttgctaatggtggtacttaccacaaaccaatgtatatcaataaaatcgtctttagtgatggtagtgaaaaagaattttctgatgccggtactcgggctatgaaagaaactactgcctatatgatgaccgaaatgatgaaaactgtcttattatacggaaccggacgtggagcctacctaccttggcttccacaagcaggtaagacaggtacttctaactatactgacgaagaaattgaaaagtatatcaagaatgctggttacgtagctccagatgaaatgtttgttggttatacccgcaaatatgcaatggctgtttggacag

SEQ ID NO: 2060 - DNA, 1249 bp, Streptococcus pneumoniae
  strain StrR-57
caactgggatggatgtctacacaaatgtagaccaagaagctcaaaaacatctgtgggatatttacaatacagacgaatacgttgcctatccagacgatgaattgcaagtcgcttctaccattgttgatgtttctaacggtaaagtcattgcccagctaggagcacgccatcagtcaagtaatgtttccttcggaattaaccaagcagtagaaacaaaccgcgactggggatcaactatgaaaccgatcacagactatgctcctgccttggagtacggtgtctacgattcaactgctactatcgttcacgatgagccctataactaccctgggacaaatactcctgtttataactgggataggggctactttggcaacatcaccttgcaatacgccctgcaacaatcgcgaaacgtcccagccgtggaaactctaaacaaggtcggactcaaccgcgccaagactttcctaaatggtctaggaatcgactacccaagtattcactactcaaatgccatttcaagtaacacaaccgaatcagacaaaaaatatggagcaagtagtgaaaagatggctgctgcttacgctgcctttgcaaatggtggaacttactataaaccaatgtatatccataaagtcgtctttagtgatgggagtgaaaaagagttctctaatgtcggaactcgtgccatgaaggaaacgacagcctatatgatgaccgacatgatgaaaacagtcttgacttatggaactggacgaaatgcctatcttgcttggctccctcaggctggtaaaacaggaacctctaactatacagacgaggaaattgaaaaccacatcaagacctctcaatttgtagcacctgatgaactatttgctggctatacgcgtaaatattcaatggctgtatggacaggctattctaaccgtctgacaccacttgtaggcaatggccttacggtcgctgccaaagtttaccgctctatgatgacctacctgtctgaaggaagcaatccagaagattggaatataccagaggggctctacagaaatggagaattcgtatttaaaaatggtgctcgttctacgtggagctcacctgctccacaacaacccccatcaactgaaagttcaagctcatcatcagatagttcaacttcacagtctagctcaaccactccaagcacaaataatagtacgactaccaatcctaacaataatacgcaacaatcaaatacaacccctgatca

SEQ ID NO: 2061 - DNA, 579 bp, Streptococcus pneumoniae
  strain StrR-60
gaagttgaacagactggtcaccaagctccttcatatccgccaacactgcaattttcttgccaccttcattggctggaatggcagagaaagtctctaaaatcagtttcatagcagttggattggcattataaacatctgacaggatatctgctccattggctgctttcttccactcggtacggttacgcgtcaattcaagatgttggaaggccaaacgaatttgctcctctgaaactccttcttgcaaggcaacataggatgcaatcatagcatttgtcgcattgtacttgccagttactggcaaatcaagggcttgctctaagaaattgaccttgaaggtcagactatctttgcgctcaaccaagtcggtaattcccagctctgctccttgaccaaaacgaaccacctttttatcagttggcaaatagtcctctacgatagggtcagccggcgctaaaagcaaggaacctgaagccattccgtctgcaatttgcatttttcctttagcaatctcagaacggtctttgaaaaaggccaaatgagcttctccaaccaaggtcacgatggctgtatggacag

SEQ ID NO: 2062 - DNA, 1216 bp, Streptococcus pneumoniae
  strain StrR-63
aagctcaaaaacatctgtgggatatctacaactccgatcaatacgtctcttaccctgacgatgatttgcaagtcgcatctacggtcgtagatgtttcaaatggtaaagtcatcgcacaacttggtgctcgtcatcaagcaagtaatgtttcattcggtaccaaccaggccgtagaaaccaatcgtgactggggatcatcaatgaaaccaatcactgactatgctcccgctttagaatatggagtctatgactctactgcttctattgtacatgatgtcccttataactatcctggcactgatactccactctacaactgggatcatgtctactttggaaacattacaatccagtatgctcttcaacaatcacgaaatgtcacagccgttgagactttgaataaggtcggtctagatagagctaaaaccttccttaatggtcttggtatcgactatccaagcatgcattatgcaaacgccatttcaagtaacacaactgaatccaacaaaaaatatggtgcaagtagtgaaaaaatggctgctgcctacgctgcttttgctaatggtggtatttatcacaaaccaatgtatatcaataaaatcgtctttagtgatggtagcgaaaaagaattttctgatgctggtacacgagctatgaaagagactactgcctatatgatgactgaaatgatgaaaactgttttaacttacggaacaggacgtggagcctacctaccatggcttccacaagcaggtaagacaggtacttctaactatactgacgaagaaattgaaaagtatatcaagaacactggttacgtagctccagatgaaatgtttgtagggtatacccgtaaatatgcaatggctgtttggacaggatactcaaatcgtctaactccaatcatcggagatggtttccttgttgctggtaaagtctatcgttcaatgataacttacctttctgaagatgaccaacctggagattggacaatgccagatggcttgtatagaaatggagaattcgtatttaaaaatggtgctcgttctacgtggagctcacctgctccacaacaacccccatcaactgaaagttcaagctcatcatcagatagttcaacttcacagtctagctcaaccactccaagcacaaataatagtacgactaccaatcctaacaataatacgcaacaatcaaatacaacccctgatcaaca

SEQ ID NO: 2063 - DNA, 810 bp, Streptococcus pneumoniae
  ref <308>: DATABASE ACCESSION NUMBER: ATCC 700673
aatacgtctcttaccctgacgatgatttgcaagtcgcatccacggtcgtagatgtttcaaatggtaaagtcatcgcccaacttggagctcgtcaccaagcaagtaacgtttcatttggtaccaaccaagctgtggaaaccaatcgtgactggggttcaacaatgaaacccatcaccgattatgcacctgccatagaatacggtgtatatgattccactgcaactatggttaatgatattccttataactatccgggaacaagcacacctgtctacaactgggatcgagcatattttggtaatattactctgcaatatgcccttcaacaatctcgtaacgtacccgccgttgagacactaaacaaggttggtttagatagagctaaaagtttcctaaatggtttaggaatcgactatcctgtaatgcactattcaaatgctatttcaagtaatactaccgaatctagtaaacagtacggggcaagtagtgaaaaaatggccactgcctatgccgcattcgcaaacggcggtatttaccacaaaccaatgtacatcaataaggttgtctttagcgatggtagcgaaaaagaattttctgaccctggcacaagagccatgaaagaaacgactgcttacatgatgacagagatgatgaaaacagtctggacttacggaactggtcgcggtgcctacctaccttggcttccacaagcaggtaaaacaggtacttctaactatactgacgaagaaattgaaaagtatatcaagaacactggttacgtagctccagatgaaatgtttgtagggtata

SEQ ID NO: 2064 - DNA, 782 bp, Streptococcus pneumoniae
  ref <308>: DATABASE ACCESSION NUMBER: ATCC 700678
tcttaccctgacgatgatttgcaagtcgcatctacggtcgtagatgtttcaaatggtaaagtcatcgcccaacttggagctcgtcaccaagcaagtaacgtttcatttggtaccaaccaagctgtggaaaccaatcgtgactggggatcaactatgaaaccaatcacagactatgctcctgccttggagtacggtgtctacgattcaactgctactatcgttcacgatgagccctataactaccctgggacagatatccctctctataactgggatcgagcatatttcggtaatattactctgcaatatgcccttcaacaatctcgtaacgtacctgccgttgaaacactaaacaaggtcggtctagataaggctaaaaccttccttaatggtcttggtatcgactatccaagcatgcattatgcaaacgccatttcaagtaatacaactgaatccaacaaaaaatatggtgcaagtagtgaaaaaatagctaccgcctatgccgcattcgcaaatggtggtatttaccacaaaccaatgtacatcaataaagttgtctttagcgatggtagcgaaaaagaattttctgaccctggcacaagagccatgaaagaaacgactgcttacatgatgacagaaatgatgaaaacagtctggacgtacggaactggtcgtggtgcctacctgccttggcttcctcaagctggtaaaacaggtacctctaactatactgacgaagaaattgaaaagtatatcaagaacactggttacgtagctccaga

SEQ ID NO: 2065 - DNA, 22 bp, Artificial Sequence
  Synthetic DNA Sequence
ccaggacgtggaggcgatcaca

SEQ ID NO: 2066 - DNA, 22 bp, Artificial Sequence
  Synthetic DNA Sequence
caccgacagcgagccgatcaga

SEQ ID NO: 2067 - DNA, 18 bp, Artificial Sequence
  Synthetic DNA Sequence
agctgagccaattcatgg

SEQ ID NO: 2068 - DNA, 19 bp, Artificial Sequence
  Synthetic DNA Sequence
attcatggaccagaacaac

SEQ ID NO: 2069 - DNA, 18 bp, Artificial Sequence
  Synthetic DNA Sequence
cgctgtcggggttgaccc

SEQ ID NO: 2070 - DNA, 18 bp, Artificial Sequence
  Synthetic DNA Sequence
gttgacccacaagcgccg

SEQ ID NO: 2071 - DNA, 18 bp, Artificial Sequence
  Synthetic DNA Sequence
cgactgtcggcgctgggg

SEQ ID NO: 2072 - DNA, 3534 bp, Mycobacterium tuberculosis
  strain Rv
gtgctggaaggatgcatcttggcagattcccgccagagcaaaacagccgctagtcctagtccgagtcgcccgcaaagttcctcgaataactccgtacccggagcgccaaaccgggtctccttcgctaagctgcgcgaaccacttgaggttccgggactccttgacgtccagaccgattcgttcgagtggctgatcggttcgccgcgctggcgcgaatccgccgccgagcggggtgatgtcaacccagtgggtggcctggaagaggtgctctacgagctgtctccgatcgaggacttctccgggtcgatgtcgttgtcgttctctgaccctcgtttcgacgatgtcaaggcacccgtcgacgagtgcaaagacaaggacatgacgtacgcggctccactgttcgtcaccgccgagttcatcaacaacaacaccggtgagatcaagagtcagacggtgttcatgggtgacttcccgatgatgaccgagaagggcacgttcatcatcaacgggaccgagcgtgtggtggtcagccagctggtgcggtcgcccggggtgtacttcgacgagaccattgacaagtccaccgacaagacgctgcacagcgtcaaggtgatcccgagccgcggcgcgtggctcgagtttgacgtcgacaagcgcgacaccgtcggcgtgcgcatcgaccgcaaacgccggcaaccggtcaccgtgctgctcaaggcgctgggctggaccagcgagcagattgtcgagcggttcgggttctccgagatcatgcgatcgacgctggagaaggacaacaccgtcggcaccgacgaggcgctgttggacatctaccgcaagctgcgtccgggcgagcccccgaccaaagagtcagcgcagacgctgttggaaaacttgttcttcaaggagaagcgctacgacctggcccgcgtcggtcgctataaggtcaacaagaagctcgggctgcatgtcggcgagcccatcacgtcgtcgacgctgaccgaagaagacgtcgtggccaccatcgaatatctggtccgcttgcacgagggtcagaccacgatgaccgttccgggcggcgtcgaggtgccggtggaaaccgacgacatcgaccacttcggcaaccgccgcctgcgtacggtcggcgagctgatccaaaaccagatccgggtcggcatgtcgcggatggagcgggtggtccgggagcggatgaccacccaggacgtggaggcgatcacaccgcagacgttgatcaacatccggccggtggtcgccgcgatcaaggagttcttcggcaccagccagctgagccaattcatggaccagaacaacccgctgtcggggttgacccacaagcgccgactgtcggcgctggggcccggcggtctgtcacgtgagcgtgccgggctggaggtccgcgacgtgcacccgtcgcactacggccggatgtgcccgatcgaaacccctgaggggcccaacatcggtctgatcggctcgctgtcggtgtacgcgcgggtcaacccgttcgggttcatcgaaacgccgtaccgcaaggtggtcgacggcgtggttagcgacgagatcgtgtacctgaccgccgacgaggaggaccgccacgtggtggcacaggccaattcgccgatcgatgcggacggtcgcttcgtcgagccgcgcgtgctggtccgccgcaaggcgggcgaggtggagtacgtgccctcgtctgaggtggactacatggacgtctcgccccgccagatggtgtcggtggccaccgcgatgattcccttcctggagcacgacgacgccaaccgtgccctcatgggggcaaacatgcagcgccaggcggtgccgctggtccgtagcgaggccccgctggtgggcaccgggatggagctgcgcgcggcgatcgacgcggcgacgtcgtcgtcgcaagaaagcggcgtcatcgaggaggtgtcggccgactacatcactgtgatgcacgacaacggcacccggcgtacctaccggatgcgcaagtttgcccggtccaaccacggcacttgcgccaaccagtgccccatcgtggacgcgggcgaccgagtcgaggccggtcaggtgatcgccgacggtccctgtactgacgacggcgagatggcgctgggcaagaacctgctggtggccatcatgccgtgggagggccacaactacgaggacgcgatcatcctgtccaaccgcctggtcgaagaggacgtgctcacctcgatccacatcgaggagcatgagatcgatgctcgcgacaccaagctgggtgcggaggagatcacccgcgacatcccgaacatctccgacgaggtgctcgccgacctggatgagcggggcatcgtgcgcatcggtgccgaggttcgcgacggggacatcctggtcggcaaggtcaccccgaagggtgagaccgagctgacgccggaggagcggctgctgcgtgccatcttcggtgagaaggcccgcgaggtgcgcgacacttcgctgaaggtgccgcacggcgaatccggcaaggtgatcggcattcgggtgttttcccgcgaggacgaggacgagttgccggccggtgtcaacgagctggtgcgtgtgtatgtggctcagaaacgcaagatctccgacggtgacaagctggccggccggcacggcaacaagggcgtgatcggcaagatcctgccggttgaggacatgccgttccttgccgacggcaccccggtggacattattttgaacacccacggcgtgccgcgacggatgaacatcggccagattttggagacccacctgggttggtgtgcccacagcggctggaaggtcgacgccgccaagggggttccggactgggccgccaggctgcccgacgaactgctcgaggcgcatgcgaacgccattgtgtcgacgccggtgttcgacggcgcccaggaggccgagctgcagggcctgttgtcgtgcacgctgcccaaccgcgacggtgacgtgctggtcgacgccgacggcaaggccatgctcttcgacgggcgcagcggcgagccgttcccgtacccggtcacggttggctacatgtacatcatgaagctgcaccacctggtggacgacaagatccacgcccgctccaccgggccgtactcgatgatcacccagcagccgctgggcggtaaggcgcagttcggtggccagcggttcggggagatggagtgctgggccatgcaggcctacggtgctgcctacaccctgcaggagctgttgaccatcaagtccgatgacaccgtcggccgcgtcaaggtgtacgaggcgatcgtcaagggtgagaacatcccggagccgggcatccccgagtcgttcaaggtgctgctcaaagaactgcagtcgctgtgcctcaacgtcgaggtgctatcgagtgacggtgcggcgatcgaactgcgcgaaggtgaggacgaggacctggagcgggccgcggccaacctgggaatcaatctgtcccgcaacgaatccgcaagtttcgaggatcttgcgtaa

SEQ ID NO: 2073 - DNA, 38 bp, Artificial Sequence
  Synthetic DNA Sequence
ccgagcaacatgattgaaccatccaccaactggctcgg

SEQ ID NO: 2074 - DNA, 38 bp, Artificial Sequence
  Synthetic DNA Sequence
ccgagcaacatgattgaagcttccaccaactggctcgg

SEQ ID NO: 2075 - DNA, 41 bp, Artificial Sequence
  Synthetic DNA Sequence
ccgagccaggttctgaagtctctgcattattaggtgctcgg

SEQ ID NO: 2076 - DNA, 39 bp, Artificial Sequence
  Synthetic DNA Sequence
ccgagcygayaacattttcagattcacccargcgctcgg

SEQ ID NO: 2077 - DNA, 33 bp, Artificial Sequence
  Synthetic DNA Sequence
ccgagcaaccgatccagctccagctacgctcgg

SEQ ID NO: 2078 - DNA, 34 bp, Artificial Sequence
  Synthetic DNA Sequence
ccgagccttggtcttcggccaaatgaacgctcgg

SEQ ID NO: 2079 - DNA, 36 bp, Artificial Sequence
  Synthetic DNA Sequence
ccgagcgttcagttacttcagtccaagccggctcgg

SEQ ID NO: 2080 - DNA, 31 bp, Artificial Sequence
  Synthetic DNA Sequence
ccgagccgaagagggccaagatgtcgctcgg

SEQ ID NO: 2081 - DNA, 24 bp, Artificial Sequence
  Synthetic DNA Sequence
gratyrtyaaagttggtgaggaag

SEQ ID NO: 2082 - DNA, 22 bp, Artificial Sequence
  Synthetic DNA Sequence
cmacttcatcycgcttcgtacc

SEQ ID NO: 2083 - DNA, 44 bp, Artificial Sequence
  Synthetic DNA Sequence
  modified_base (27): i
ccgccgatgttccgtaaattacttgangaaggtcgagccggcgg

SEQ ID NO: 2084 - DNA, 38 bp, Artificial Sequence
  Synthetic DNA Sequence
cacgcgtcaacacccgtacaagtcgtcttttgcgcgtg

SEQ ID NO: 2085 - DNA, 24 bp, Artificial Sequence
  Synthetic DNA Sequence
caaactaaagaacatatcttgcta

SEQ ID NO: 2086 - DNA, 23 bp, Artificial Sequence
  Synthetic DNA Sequence
atataatttgcatcaccttcaag

SEQ ID NO: 2087 - DNA, 22 bp, Artificial Sequence
  Synthetic DNA Sequence
tcagctcgtgggattaggagag

SEQ ID NO: 2088 - DNA, 22 bp, Artificial Sequence
  Synthetic DNA Sequence
aggcttcacgctgttaggctga

SEQ ID NO: 2089 - DNA, 20 bp, Artificial Sequence
  Synthetic DNA Sequence
atgctgaacttattgacctt

SEQ ID NO: 2090 - DNA, 19 bp, Artificial Sequence
  Synthetic DNA Sequence
cgttactggagtcgaaatg

SEQ ID NO: 2091 - DNA, 39 bp, Artificial Sequence
  Synthetic DNA Sequence
cgcgacttgagatggaacttagtgagcttcttggtcgcg

SEQ ID NO: 2092 - DNA, 38 bp, Artificial Sequence
  Synthetic DNA Sequence
cgcgacgaaagaacttcctgaaggtcgtgcaggtccag

SEQ ID NO: 2093 - DNA, 20 bp, Artificial Sequence
  Synthetic DNA Sequence
tgttggcaatcgaagacacc

SEQ ID NO: 2094 - DNA, 24 bp, Artificial Sequence
  Synthetic DNA Sequence
ttcaatttcttgacctactttcaa

SEQ ID NO: 2095 - DNA, 18 bp, Artificial Sequence
  Synthetic DNA Sequence
cggtcgggttgaacgtgg

SEQ ID NO: 2096 - DNA, 34 bp, Artificial Sequence
  Synthetic DNA Sequence
cgcgaccggtaccacggccagtaatcgtgtcgcg

SEQ ID NO: 2097 - DNA, 1185 bp, Mycoplasma pneumoniae
  ref <308>: DATABASE ACCESSION NUMBER: ATCC 29342
atggcaagagagaaatttgaccgatctaaaccccacgttaatgtaggtactattggccacattgaccacggtaaaacaactttaacagcagctatttgtactgtattagcaaaagaaggtaaatcagctgctactcgttacgaccaaatcgataaggctccggaagaaaaagcacggggaattacgattaactccgctcacgtggagtactcctctgacaagcgtcactatgctcacgttgactgtccaggacacgctgactacattaagaacatgattactggtgctgcacaaatggatggtgccattctagtagtttcagcaactgacagtgttatgccccaaacccgtgaacacattttgttggcccgccaagtgggtgtgccacgcatggtagtgttcctaaacaagtgtgacattgcaactgatgaagaagtgcaagagttagtagcagaagaggtacgtgacttattaacttcttacggctttgatggcaagaacacccctattatttatggttctgcacttaaagcgcttgaaggtgatcctaagtgggaagctaagatccatgatttaatgaatgcagttgatgaatggattccaactcctgaacgtgaagtggacaaacccttcttgttggcaatcgaagacaccatgacgattactggccgtggtaccgtggttaccggtcgggttgaacgtggtgaattgaaagtaggtcaagaaattgaaatcgttggtttacgtccaatccgtaaagcagttgttaccggaatcgaaatgttcaaaaaggaacttgattcagcaatggctggggacaacgctggggtattactccgtggtgtggaccgtaaagaagtggaacgtggtcaagtgttagctaaaccaggttcgattaaaccgcacaagaaatttaaagcggaaatctatgctttaaagaaggaagaaggtggtcgtcacaccggtttcttaaacggttaccgtccccaattctacttccgtactacagacgttactggttcgatttccctaccagaaaacaccgaaatggtgctaccaggtgacaatacctcgattacagttgaactaattgcaccaattgcttgtgaaaaaggtagtaagttctccatccgtgaaggtggtcgaacggttggtgctggttcagtcacggaagtgcttgaatag

SEQ ID NO: 2098 - DNA, 22 bp, Artificial Sequence
  Synthetic DNA Sequence
ctgagtcacaccgacaaacgtc

SEQ ID NO: 2099 - DNA, 22 bp, Artificial Sequence
  Synthetic DNA Sequence
ccaggactgaacgggatacgaa

SEQ ID NO: 2100 - DNA, 18 bp, Artificial Sequence
  Synthetic DNA Sequence
gcgagacgataggttgtc

SEQ ID NO: 2101 - DNA, 2609 bp, Mycobacterium tuberculosis
  strain H37Rv
cagcccgcgagcgtaacctggctgcgatttccggcgcggattttcgcagtgcggttacgctcggaaagcgcgggcctcgcccacgcggcggatgatgtcagcggggtggtcctcggcgacgacccggaccacgatccacccgtagcggtgctggactttctcgtgccggaggatgtctttccggtagtggtagcgactggtcagatggtggtcgccgtcatactcggccgcgaccttgatgtcttgccagcccatatccaaatgggcttccgcccagccccattcgttgcgcaccgcgatctgcgtctgggggcgcggaaagccggcgcggatcaacaacaagcgcagccaggtttccttgggggactgggcaccgccgtcgacgaggtccagagcggctcttgcggccttcatgccacggcggccccgatagcgctcgatcagcggctcgacgtcggccaccttcaaatcggtggcctgtatcagggcgtcgacggccgcgacggcggggtccaatggaaatcgactggtcaggtcgagcgccgttcgctccggtgtggtcacgcgcatgccctcgatgacgcagatctcgtcgggctcgatgcgctcttcccagacttgcagccccggggcacggcggcggttggtgtcgatgatcgcggcgggaagatccgcgtcgatccacttggcgccatggaaggcagaagccgagtagccggccagcacgccgcggcggcgcgagcgcagccacagcgcttttgcacgcaattgcgcggtcagttccacaccctgcggcacgtacacgtctttatgtagcgcgacatacctgctgcgcaattcgtagggcgtcaatacacccgcagccagggcctcgctgcccagaaagggatccgtcatggtcgaagtgtgctgagtcacaccgacaaacgtcacgagcgtaaccccagtgcgaaagttcccgccggaaatcgcagccacgttacgctcgtggacataccgatttcggcccggccgcggcgagacgataggttgtcggggtgactgccacagccactgaaggggccaaacccccattcgtatcccgttcagtcctggttaccggaggaaaccgggggatcgggctggcgatcgcacagcggctggctgccgacggccacaaggtggccgtcacccaccgtggatccggagcgccaaaggggctgtttggcgtcgaatgtgacgtcaccgacagcgacgccgtcgatcgcgccttcacggcggtagaagagcaccagggtccggtcgaggtgctggtgtccaacgccggcctatccgcggacgcattcctcatgcggatgaccgaggaaaagttcgagaaggtcatcaacgccaacctcaccggggcgttccgggtggctcaacgggcatcgcgcagcatgcagcgcaacaaattcggtcgaatgatattcataggttcggtctccggcagctggggcatcggcaaccaggccaactacgcagcctccaaggccggagtgattggcatggcccgctcgatcgcccgcgagctgtcgaaggcaaacgtgaccgcgaatgtggtggccccgggctacatcgacaccgatatgacccgcgcgctggatgagcggattcagcagggggcgctgcaatttatcccagcgaagcgggtcggcacccccgccgaggtcgccggggtggtcagcttcctggcttccgaggatgcgagctatatctccggtgcggtcatcccggtcgacggcggcatgggtatgggccactgacacaacacaaggacgcacatgacaggactgctggacggcaaacggattctggttagcggaatcatcaccgactcgtcgatcgcgtttcacatcgcacgggtagcccaggagcagggcgcccagctggtgctcaccgggttcgaccggctgcggctgattcagcgcatcaccgaccggctgccggcaaaggccccgctgctcgaactcgacgtgcaaaacgaggagcacctggccagcttggccggccgggtgaccgaggcgatcggggcgggcaacaagctcgacggggtggtgcattcgattgggttcatgccgcagaccgggatgggcatcaacccgttcttcgacgcgccctacgcggatgtgtccaagggcatccacatctcggcgtattcgtatgcttcgatggccaaggcgctgctgccgatcatgaaccccggaggttccatcgtcggcatggacttcgacccgagccgggcgatgccggcctacaactggatgacggtcgccaagagcgcgttggagtcggtcaacaggttcgtggcgcgcgaggccggcaagtacggtgtgcgttcgaatctcgttgccgcaggccctatccggacgctggcgatgagtgcgatcgtcggcggtgcgctcggcgaggaggccggcgcccagatccagctgctcgaggagggctgggatcagcgcgctccgatcggctggaacatgaaggatgcgacgccggtcgccaagacggtgtgcgcgctgctgtctgactggctgccggcgaccacgggtgacatcatctacgccgacggcggcgcgcacacccaattgctctag

SEQ ID NO: 2102 - DNA, 20 bp, Artificial Sequence
  Synthetic DNA Sequence
caccttcaccctgaccgacg

SEQ ID NO: 2103 - DNA, 23 bp, Artificial Sequence
  Synthetic DNA Sequence
cgaaccagcggaaatagttggac

SEQ ID NO: 2104 - DNA, 18 bp, Artificial Sequence
  Synthetic DNA Sequence
  modified_base (12): i
ctgggcatggcncgagtc

SEQ ID NO: 2105 - DNA, 3297 bp, Mycobacterium tuberculosis
  strain H37Rv
atgacacagtgcgcgagcagacgcaaaagcaccccaaatcgggcgattttgggggcttttgcgtctgctcgcgggacgcgctgggtggccaccatcgccgggctgattggctttgtgttgtcggtggcgacgccgctgctgcccgtcgtgcagaccaccgcgatgctcgactggccacagcgggggcaactgggcagcgtgaccgccccgctgatctcgctgacgccggtcgactttaccgccaccgtgccgtgcgacgtggtgcgcgccatgccacccgcgggcggggtggtgctgggcaccgcacccaagcaaggcaaggacgccaatttgcaggcgttgttcgtcgtcgtcagcgcccagcgcgtggacgtcaccgaccgcaacgtggtgatcttgtccgtgccgcgcgagcaggtgacgtccccgcagtgtcaacgcatcgaggtcacctctacccacgccggcaccttcgccaacttcgtcgggctcaaggacccgtcgggcgcgccgctgcgcagcggcttccccgaccccaacctgcgcccgcagattgtcggggtgttcaccgacctgaccgggcccgcgccgcccgggctggcggtctcggcgaccatcgacacccggttctccacccggccgaccacgctgaaactgctggcgatcatcggggcgatcgtggccaccgtcgtcgcactgatcgcgttgtggcgcctggaccagttggacgggcggggctcaattgcccagctcctcctcaggccgttccggcctgcatcgtcgccgggcggcatgcgccggctgattccggcaagctggcgcaccttcaccctgaccgacgccgtggtgatattcggcttcctgctctggcatgtcatcggcgcgaattcgtcggacgacggctacatcctgggcatggcccgagtcgccgaccacgccggctacatgtccaactatttccgctggttcggcagcccggaggatcccttcggctggtattacaacctgctggcgctgatgacccatgtcagcgacgccagtctgtggatgcgcctgccagacctggccgccgggctagtgtgctggctgctgctgtcgcgtgaggtgctgccccgcctcgggccggcggtggaggccagcaaacccgcctactgggcggcggccatggtcttgctgaccgcgtggatgccgttcaacaacggcctgcggccggagggcatcatcgcgctcggctcgctggtcacctatgtgctgatcgagcggtccatgcggtacagccggctcacaccggcggcgctggccgtcgttaccgccgcattcacactgggtgtgcagcccaccggcctgatcgcggtggccgcgctggtggccggcggccgcccgatgctgcggatcttggtgcgccgycatcgcctggtcggcacgttgccgttggtgtcgccgatgctggccgccggcaccgtcatcctgaccgtggtgttcgccgaccagaccctgtcaacggtgttggaagccaccagggttcgcgccaaaatcgggccgagccaggcgtggtataccgagaacctgcgttactactacctcatcctgcccaccgtcgacggttcgctgtcgcggcgcttcggctttttgatcaccgcgctatgcctgttcaccgcggtgttcatcatgttgcggcgcaagcgaattcccagcgtggcccgcggaccggcgtggcggctgatgggcgtcatcttcggcaccatgttcttcctgatgttcacgcccaccaagtgggtgcaccacttcgggctgttcgccgccgtaggggcggcgatggccgcgctgacgacggtgttggtatccccatcggtgctgcgctggtcgcgcaaccggatggcgttcctggcggcgttattcttcctgctggcgttgtgttgggccaccaccaacggctggtggtatgtctccagctacggtgtgccgttcaacagcgcgatgccgaagatcgacgggatcacagtcagcacaatctttttcgccctgtttgcgatcgccgccggctatgcggcctggctgcacttcgcgccccgcggcgccggcgaagggcggctgatccgcgcgctgacgacagccccggtaccgatcgtggccggtttcatggcggcggtgttcgtcgcgtccatggtggccgggatcgtgcgacagtacccgacctactccaacggctggtccaacgtgcgggcgtttgtcggcggctgcggactggccgacgacgtactcgtcgagcctgataccaatgcgggtttcatgaagccgctggacggcgattcgggttcttggggccccttgggcccgctgggtggagtcaacccggtcggcttcacgcccaacggcgtaccggaacacacggtggccgaggcgatcgtgatgaaacccaaccagcccggcaccgactacgactgggatgcgccgaccaagctgacgagtcctggcatcaatggttctacggtgccgctgccctatgggctcgatcccgcccgggtaccgttggcaggcacctacaccaccggcgcacagcaacagagcacactcgtctcggcgtggtatctcctgcctaagccggacgacgggcatccgctggtcgtggtgaccgccgcgggcaagatcgccggcaacagcgtgctgcacgggtacacccccgggcagactgtggtgctcgaatacgccatgccgggacccggagcgctggtacccgccgggcggatggtgcccgacgacctatacggagagcagcccaaggcgtggcgcaacctgcgcttcgcccgagcaaagatgcccgccgatgccgtcgcggtccgggtggtggccgaggatctgtcgctgacaccggaggactggatcgcggtgaccccgccgcgggtaccggacctgcgctcactgcaggaatatgtgggctcgacgcagccggtgctgctggactgggcggtcggtttggccttcccgtgccagcagccgatgctgcacgccaatggcatcgccgaaatcccgaagttccgcatcacaccggactactcggctaagaagctggacaccgacacgtgggaagacggcactaacggcggcctgctcgggatcaccgacctgttgctgcgggcccacgtcatggccacctacctgtcccgcgactgggcccgcgattggggttccctgcgcaagttcgacaccctggtcgatgcccctcccgcccagctcgagttgggcaccgcgacccgcagcggcctgtggtcaccgggcaagatccgaattggtccatag

SEQ ID NO: 2106 - DNA, 31 bp, Artificial Sequence
  Synthetic DNA Sequence
gcgagcagagcacgccctcctcgccgctcgc

SEQ ID NO: 2107 - DNA, 32 bp, Artificial Sequence
  Synthetic DNA Sequence
gcgagctccccatctctggttggcacgctcgc

SEQ ID NO: 2108 - DNA, 41 bp, Artificial Sequence
  Synthetic DNA Sequence
gcgggcaacttcrtcaagaaggttggttacaacccgcccgc

SEQ ID NO: 2109 - DNA, 38 bp, Artificial Sequence
  Synthetic DNA Sequence
gcgggcccaatctctggttggaayggtgacaagcccgc

SEQ ID NO: 2110 - DNA, 41 bp, Artificial Sequence
  Synthetic DNA Sequence
gcgggcccttaacgatttcagcgaatctggattcagcccgc

SEQ ID NO: 2111 - DNA, 41 bp, Artificial Sequence
  Synthetic DNA Sequence
gcgggcatgattgaagccaccaccaacgcttcctggcccgc

SEQ ID NO: 2112 - DNA, 43 bp, Artificial Sequence
  Synthetic DNA Sequence
gcgggcttgatgaagttttgggtttccttgacaatttgcccgc

SEQ ID NO: 2113 - DNA, 41 bp, Artificial Sequence
  Synthetic DNA Sequence
gcgggcacaagggttggactaaggaaaccaaggcagcccgc

SEQ ID NO: 2114 - DNA, 41 bp, Artificial Sequence
  Synthetic DNA Sequence
gcgggcatcgatgctattgaaccacctgtcagaccgcccgc

SEQ ID NO: 2115 - DNA, 39 bp, Artificial Sequence
  Synthetic DNA Sequence
gcgggcttgatgatttcctcgaatctagattgggcccgc

SEQ ID NO: 2116 - DNA, 39 bp, Artificial Sequence
  Synthetic DNA Sequence
gcgggcggtaagtccaccggtaagaccttgttggcccgc

SEQ ID NO: 2117 - DNA, 36 bp, Artificial Sequence
  Synthetic DNA Sequence
gcgggcgacgccattgagccaccttcgagagcccgc

SEQ ID NO: 2118 - DNA, 42 bp, Artificial Sequence
  Synthetic DNA Sequence
gcgggctccttgacaatttcttcgtatctgttcttggcccgc

SEQ ID NO: 2119 - DNA, 40 bp, Artificial Sequence
  Synthetic DNA Sequence
gcgggcttacaaccctaaggctgttccattcgttgcccgc

SEQ ID NO: 2120 - DNA, 41 bp, Artificial Sequence
  Synthetic DNA Sequence
gcgggcagaaaccaaggctggtaaggttaccggtagcccgc

SEQ ID NO: 2121 - DNA, 31 bp, Artificial Sequence
  Synthetic DNA Sequence
  modified_base (8): i
cgaccgcnagccgcacaccaagttccggtcg

SEQ ID NO: 2122 - DNA, 35 bp, Artificial Sequence
  Synthetic DNA Sequence
ccgagcgaatgtaggagtccagggtctctgctcgg

SEQ ID NO: 2123 - DNA, 19 bp, Artificial Sequence
  Synthetic DNA Sequence
tctaccactgaagcattac

SEQ ID NO: 2124 - DNA, 20 bp, Artificial Sequence
  Synthetic DNA Sequence
taggtactgtaggtttattg

SEQ ID NO: 2125 - DNA, 37 bp, Artificial Sequence
  Synthetic DNA Sequence
cacgcggattttgaatctcttcctctagtagcgcgtg

SEQ ID NO: 2126 - DNA, 18 bp, Artificial Sequence
  Synthetic DNA Sequence
atatcagagactgatgag

SEQ ID NO: 2127 - DNA, 22 bp, Artificial Sequence
  Synthetic DNA Sequence
tagcatattcagagaatattgt

SEQ ID NO: 2128 - DNA, 37 bp, Artificial Sequence
  Synthetic DNA Sequence
caacgctggagaatctatatttgtagaaactgcgttg

SEQ ID NO: 2129 - DNA, 7733 bp, Clostridium difficile
  strain VPI 10463
atgtctttaatatctaaagaagagttaataaaactcgcatatagcattagaccaagagaaaatgagtataaaactatactaactaatttagacgaatataataagttaactacaaacaataatgaaaataaatatttgcaattaaaaaaactaaatgaatcaattgatgtttttatgaataaatataaaacttcaagcagaaatagagcactctctaatctaaaaaaagatatattaaaagaagtaattcttattaaaaattccaatacaagccctgtagaaaaaaatttacattttgtatggataggtggagaagtcagtgatattgctcttgaatacataaaacaatgggctgatattaatgcagaatataatattaaactgtggtatgatagtgaagcattcttagtaaatacactaaaaaaggctatagttgaatcttctaccactgaagcattacagctactagaggaagagattcaaaatcctcaatttgataatatgaaattttacaaaaaaaggatggaatttatatatgatagacaaaaaaggtttataaattattataaatctcaaatcaataaacctacagtacctacaatagatgatattataaagtctcatctagtatctgaatataatagagatgaaactgtattagaatcatatagaacaaattctttgagaaaaataaatagtaatcatgggatagatatcagggctaatagtttgtttacagaacaagagttattaaatatttatagtcaggagttgttaaatcgtggaaatttagctgcagcatctgacatagtaagattattagccctaaaaaattttggcggagtatatttagatgttgatatgcttccaggtattcactctgatttatttaaaacaatatctagacctagctctattggactagaccgttgggaaatgataaaattagaggctattatgaagtataaaaaatatataaataattatacatcagaaaactttgataaacttgatcaacaattaaaagataattttaaactcattatagaaagtaaaagtgaaaaatctgagatattttctaaattagaaaatttaaatgtatctgatcttgaaattaaaatagctttcgctttaggcagtgttataaatcaagccttgatatcaaaacaaggttcatatcttactaacctagtaatagaacaagtaaaaaatagatatcaatttttaaaccaacaccttaacccagccatagagtctgataataacttcacagatactactaaaatttttcatgattcattatttaattcagctaccgcagaaaactctatgtttttaacaaaaatagcaccatacttacaagtaggttttatgccagaagctcgctccacaataagtttaagtggtccaggagcttatgcgtcagcttactatgatttcataaatttacaagaaaatactatagaaaaaactttaaaagcatcagatttaatagaatttaaattcccagaaaataatctatctcaattgacagaacaagaaataaatagtctatggagctttgatcaagcaagtgcaaaatatcaatttgagaaatatgtaagagattatactggtggatctctttctgaagacaatggggtagactttaataaaaatactgccctcgacaaaaactatttattaaataataaaattccatcaaacaatgtagaagaagctggaagtaaaaattatgttcattatatcatacagttacaaggagatgatataagttatgaagcaacatgcaatttattttctaaaaatcctaaaaatagtattattatacaacgaaatatgaatgaaagtgcaaaaagctactttttaagtgatgatggagaatctattttagaattaaataaatataggatacctgaaagattaaaaaataaggaaaaagtaaaagtaacctttattggacatggtaaagatgaattcaacacaagcgaatttgctagattaagtgtagattcactttccaatgagataagttcatttttagataccataaaattagatatatcacctaaaaatgtagaagtaaacttacttggatgtaatatgtttagttatgattttaatgttgaagaaacttatcctgggaagttgctattaagtattatggacaaaattacttccactttacctgatgtaaataaaaattctattactataggagcaaatcaatatgaagtaagaattaatagtgagggaagaaaagaacttctggctcactcaggtaaatggataaataaagaagaagctattatgagcgatttatctagtaaagaatacattttttttgattctatagataataagctaaaagcaaagtccaagaatattccaggattagcatcaatatcagaagatataaaaacattattacttgatgcaagtgttagtcctgatacaaaatttattttaaataatcttaagcttaatattgaatcttctattggggattacatttattatgaaaaattagagcctgttaaaaatataattcacaattctatagatgatttaatagatgagttcaatctacttgaaaatgtatctgatgaattatatgaattaaaaaaattaaataatctagatgagaagtatttaatatcttttgaagatatctcaaaaaataattcaacttactctgtaagatttattaacaaaagtaatggtgagtcagtttatgtagaaacagaaaaagaaattttttcaaaatatagcgaacatattacaaaagaaataagtactataaagaatagtataattacagatgttaatggtaatttattggataatatacagttagatcatacttctcaagttaatacattaaacgcagcattctttattcaatcattaatagattatagtagcaataaagatgtactgaatgatttaagtacctcagttaaggttcaactttatgctcaactatttagtacaggtttaaatactatatatgactctatccaattagtaaatttaatatcaaatgcagtaaatgatactataaatgtactacctacaataacagaggggatacctattgtatctactatattagacggaataaacttaggtgcagcaattaaggaattactagacgaacatgacccattactaaaaaaagaattagaagctaaggtgggtgttttagcaataaatatgtcattatctatagctgcaactgtagcttcaattgttggaataggtgctgaagttactattttcttattacctatagctggtatatctgcaggaataccttcattagttaataatgaattaatattgcatgataaggcaacttcagtggtaaactattttaatcatttgtctgaatctaaaaaatatggccctcttaaaacagaagatgataaaattttagttcctattgatgatttagtaatatcagaaatagattttaataataattcgataaaactaggaacatgtaatatattagcaatggaggggggatcaggacacacagtgactggtaatatagatcactttttctcatctccatctataagttctcatattccttcattatcaatttattctgcaataggtatagaaacagaaaatctagatttttcaaaaaaaataatgatgttacctaatgctccttcaagagtgttttggtgggaaactggagcagttccaggtttaagatcattggaaaatgacggaactagattacttgattcaataagagatttatacccaggtaaattttactggagattctatgcttttttcgattatgcaataactacattaaaaccagtttatgaagacactaatattaaaattaaactagataaagatactagaaacttcataatgccaactataactactaacgaaattagaaacaaattatcttattcatttgatggagcaggaggaacttactctttattattatcttcatatccaatatcaacgaatataaatttatctaaagatgatttatggatatttaatattgataatgaagtaagagaaatatctatagaaaatggtactattaaaaaaggaaagttaataaaagatgttttaagtaaaattgatataaataaaaataaacttattataggcaatcaaacaatagatttttcaggcgatatagataataaagatagatatatattcttgacttgtgagttagatgataaaattagtttaataatagaaataaatcttgttgcaaaatcttatagtttgttattgtctggggataaaaattatttgatatccaatttatctaatactattgagaaaatcaatactttaggcctagatagtaaaaatatagcgtacaattacactgatgaatctaataataaatattttggagctatatctaaaacaagtcaaaaaagcataatacattataaaaaagacagtaaaaatatattagaattttataatgacagtacattagaatttaacagtaaagattttattgctgaagatataaatgtatttatgaaagatgatattaatactataacaggaaaatactatgttgataataatactgataaaagtatagatttctctatttctttagttagtaaaaatcaagtaaaagtaaatggattatatttaaatgaatccgtatactcatcttaccttgattttgtgaaaaattcagatggacaccataatacttctaattttatgaatttatttttggacaatataagtttctggaaattgtttgggtttgaaaatataaattttgtaatcgataaatactttacccttgttggtaaaactaatcttggatatgtagaatttatttgtgacaataataaaaatatagatatatattttggtgaatggaaaacatcgtcatctaaaagcactatatttagcggaaatggtagaaatgttgtagtagagcctatatataatcctgatacgggtgaagatatatctacttcactagatttttcctatgaacctctctatggaatagatagatatataaataaagtattgatagcacctgatttatatacaagtttaataaatattaataccaattattattcaaatgagtactaccctgagattatagttcttaacccaaatacattccacaaaaaagtaaatataaatttagatagttcttcttttgagtataaatggtctacagaaggaagtgactttattttagttagatacttagaagaaagtaataaaaaaatattacaaaaaataagaatcaaaggtatcttatctaatactcaatcatttaataaaatgagtatagattttaaagatattaaaaaactatcattaggatatataatgagtaattttaaatcatttaattctgaaaatgaattagatagagatcatttaggatttaaaataatagataataaaacttattactatgatgaagatagtaaattagttaaaggattaagcaagtaattgacaataataagtattatttcaatcctgacactgctatcatctcaaaaggttggcagactgttaatggtagtagatactactttgatactgataccgctattgcctttaatggttataaaactattgatggtaaacacttttattttgatagtgattgtgtagtgaaaataggtgtgtttagtacctctaatggatttgaatattttgcacctgctaatacttataataataacatagaaggtcaggctatagtttatcaaagtaaattcttaactttgaatggtaaaaaatattactttgataataactcaaaagcagttaccggattgcaaactattgatagtaaaaaatattactttaatactaacactgctgaagcagctactggatggcaaactattgatggtaaaaaatattactttaatactaacactgctgaagcagctactggatggcaaactattgatggtaaaaaatattactttaatactaacactgctatagcttcaactggttatacaattattaatggtaaacatttttattttaatactgatggtattatgcagataggagtgtttaaaggacctaatggatttgaatattttgcacctgctaatacggatgctaacaacatagaaggtcaagctatactttaccaaaatgaattcttaactttgaatggtaaaaaatattactttggtagtgactcaaaagcagttactggatggagaattattaacaataagaaatattactttaatcctaataatgctattgctgcaattcatctatgcactataaataatgacaagtattactttagttatgatggaattcttcaaaatggatatattactattgaaagaaataatttctattttgatgctaataatgaatctaaaatggtaacaggagtatttaaaggacctaatggatttgagtattttgcacctgctaatactcacaataataacatagaaggtcaggctatagtttaccagaacaaattcttaactttgaatggcaaaaaatattattttgataatgactcaaaagcagttactggatggcaaaccattgatggtaaaaaatattactttaatcttaacactgctgaagcagctactggatggcaaactattgatggtaaaaaatattactttaatcttaacactgctgaagcagctactggatggcaaactattgatggtaaaaaatattactttaatactaacactttcatagcctcaactggttatacaagtattaatggtaaacatttttattttaatactgatggtattatgcagataggagtgtttaaaggacctaatggatttgaatactttgcacctgctaatacggatgctaacaacatagaaggtcaagctatactttaccaaaataaattcttaactttgaatggtaaaaaatattactttggtagtgactcaaaagcagttaccggactgcgaactattgatggtaaaaaatattactttaatactaacactgctgttgcagttactggatggcaaactattaatggtaaaaaatactactttaatactaacacttctatagcttcaactggttatacaattattagtggtaaacatttttattttaatactgatggtattatgcagataggagtgtttaaaggacctgatggatttgaatactttgcacctgctaatacagatgctaacaatatagaaggtcaagctatacgttatcaaaatagattcctatatttacatgacaatatatattattttggtaataattcaaaagcggctactggttgggtaactattgatggtaatagatattacttcgagcctaatacagctatgggtgcgaatggttataaaactattgataataaaaatttttactttagaaatggtttacctcagataggagtgtttaaagggtctaatggatttgaatactttgcacctgctaatacggatgctaacaatatagaaggtcaagctatacgttatcaaaatagattcctacatttacttggaaaaatatattactttggtaataattcaaaagcagttactggatggcaaactattaatggtaaagtatattactttatgcctgatactgctatggctgcagctggtggacttttcgagattgatggtgttatatatttctttggtgttgatggagtaaaagcccctgggatatatggctaa

SEQ ID NO: 2130 - DNA, 7101 bp, Clostridium difficile
  strain VPI 10463
atgagtttagttaatagaaaacagttagaaaaaatggcaaatgtaagatttcgtactcaagaagatgaatatgttgcaatattggatgctttagaagaatatcataatatgtcagagaatactgtagtcgaaaaatatttaaaattaaaagatataaatagtttaacagatatttatatagatacatataaaaaatctggtagaaataaagccttaaaaaaatttaaggaatatctagttacagaagtattagagctaaagaataataatttaactccagttgagaaaaatttacattttgtttggattggaggtcaaataaatgacactgctattaattatataaatcaatggaaagatgtaaatagtgattataatgttaatgttttttatgatagtaatgcatttttgataaacacattgaaaaaaactgtagtagaatcagcaataaatgatacacttgaatcatttagagaaaacttaaatgaccctagatttgactataataaattcttcagaaaacgtatggaaataatttatgataaacagaaaaatttcataaactactataaagctcaaagagaagaaaatcctgaacttataattgatgatattgtaaagacatatctttcaaatgagtattcaaaggagatagatgaacttaatacctatattgaagaatccttaaataaaattacacagaatagtggaaatgatgttagaaactttgaagaatttaaaaatggagagtcattcaacttatatgaacaagagttggtagaaaggtggaatttagctgctgcttctgacatattaagaatatctgcattaaaagaaattggtggtatgtatttagatgttgatatgttaccaggaatacaaccagacttatttgagtctatagagaaacctagttcagtaacagtggatttttgggaaatgacaaagttagaagctataatgaaatacaaagaatatataccagaatatacctcagaacattttgacatgttagacgaagaagttcaaagtagttttgaatctgttctagcttctaagtcagataaatcagaaatattctcatcacttggtgatatggaggcatcaccactagaagttaaaattgcatttaatagtaagggtattataaatcaagggctaatttctgtgaaagactcatattgtagcaatttaatagtaaaacaaatcgagaatagatataaaatattgaataatagtttaaatccagctattagcgaggataatgattttaatactacaacgaatacctttattgatagtataatggctgaagctaatgcagataatggtagatttatgatggaactaggaaagtatttaagagttggtttcttcccagatgttaaaactactattaacttaagtggccctgaagcatatgcggcagcttatcaagatttattaatgtttaaagaaggcagtatgaatatccatttgatagaagctgatttaagaaactttgaaatctctaaaactaatatttctcaatcaactgaacaagaaatggctagcttatggtcatttgacgatgcaagagctaaagctcaatttgaagaatataaaaggaattattttgaaggttctcttggtgaagatgataatcttgatttttctcaaaatatagtagttgacaaggagtatcttttagaaaaaatatcttcattagcaagaagttcagagagaggatatatacactatattgttcagttacaaggagataaaattagttatgaagcagcatgtaacttatttgcaaagactccttatgatagtgtactgtttcagaaaaatatagaagattcagaaattgcatattattataatcctggagatggtgaaatacaagaaatagacaagtataaaattccaagtataatttctgatagacctaagattaaattaacatttattggtcatggtaaagatgaatttaatactgatatatttgcaggttttgatgtagattcattatccacagaaatagaagcagcaatagatttagctaaagaggatatttctcctaagtcaatagaaataaatttattaggatgtaatatgtttagctactctatcaacgtagaggagacttatcctggaaaattattacttaaagttaaagataaaatatcagaattaatgccatctataagtcaagactctattatagtaagtgcaaatcaatatgaagttagaataaatagtgaaggaagaagagaattattggatcattctggtgaatggataaataaagaagaaagtattataaaggatatttcatcaaaagaatatatatcatttaatcctaaagaaaataaaattacagtaaaatctaaaaatttacctgagctatctacattattacaagaaattagaaataattctaattcaagtgatattgaactagaagaaaaagtaatgttaacagaatgtgagataaatgttatttcaaatatagatacgcaaattgttgaggaaaggattgaagaagctaagaatttaacttctgactctattaattatataaaagatgaatttaaactaatagaatctatttctgatgcactatgtgacttaaaacaacagaatgaattagaagattctcattttatatcttttgaggacatatcagagactgatgagggatttagtataagatttattaataaagaaactggagaatctatatttgtagaaactgaaaaaacaatattctctgaatatgctaatcatataactgaagagatttctaagataaaaggtactatatttgatactgtaaatggtaagttagtaaaaaaagtaaatttagatactacacacgaagtaaatactttaaatgctgcattttttatacaatcattaatagaatataatagttctaaagaatctcttagtaatttaagtgtagcaatgaaagtccaagtttacgctcaattatttagtactggtttaaatactattacagatgcagccaaagttgttgaattagtatcaactgcattagatgaaactatagacttacttcctacattatctgaaggattacctataattgcaactattatagatggtgtaagtttaggtgcagcaatcaaagagctaagtgaaacgagtgacccattattaagacaagaaatagaagctaagataggtataatggcagtaaatttaacaacagctacaactgcaatcattacttcatctttggggatagctagtggatttagtatacttttagttcctttagcaggaatttcagcaggtataccaagcttagtaaacaatgaacttgtacttcgagataaggcaacaaaggttgtagattattttaaacatgtttcattagttgaaactgaaggagtatttactttattagatgataaaataatgatgccacaagatgatttagtgatatcagaaatagattttaataataattcaatagttttaggtaaatgtgaaatctggagaatggaaggtggttcaggtcatactgtaactgatgatatagatcacttcttttcagcaccatcaataacatatagagagccacacttatctatatatgacgtattggaagtacaaaaagaagaacttgatttgtcaaaagatttaatggtattacctaatgctccaaatagagtatttgcttgggaaacaggatggacaccaggtttaagaagcttagaaaatgatggcacaaaactgttagaccgtataagagataactatgaaggtgagttttattggagatattttgcttttatagctgatgctttaataacaacattaaaaccaagatatgaagatactaatataagaataaatttagatagtaatactagaagttttatagttccaataataactacagaatatataagagaaaaattatcatattctttctatggttcaggaggaacttatgcattgtctctttctcaatataatatgggtataaatatagaattaagtgaaagtgatgtttggattatagatgttgataatgttgtgagagatgtaactatagaatctgataaaattaaaaaaggtgatttaatagaaggtattttatctacactaagtattgaagagaataaaattatcttaaatagccatgagattaatttttctggtgaggtaaatggaagtaatggatttgtttctttaacattttcaattttagaaggaataaatgcaattatagaagttgatttattatctaaatcatataaattacttatttctggcgaattaaaaatattgatgttaaattcaaatcatattcaacagaaaatagattatataggattcaatagcgaattacagaaaaatataccatatagctttgtagatagtgaaggaaaagagaatggttttattaatggttcaacaaaagaaggtttatttgtatctgaattacctgatgtagttcttataagtaaggtttatatggatgatagtaagccttcatttggatattatagtaataatttgaaagatgtcaaagttataactaaagataatgttaatatattaacaggttattatcttaaggatgatataaaaatctctctttctttgactctacaagatgaaaaaactataaagttaaatagtgtgcatttagatgaaagtggagtagctgagattttgaagttcatgaatagaaaaggtaatacaaatacttcagattctttaatgagctttttagaaagtatgaatataaaaagtattttcgttaatttcttacaatctaatattaagtttatattagatgctaattttataataagtggtactacttctattggccaatttgagtttatttgtgatgaaaatgataatatacaaccatatttcattaagtttaatacactagaaactaattatactttatatgtaggaaatagacaaaatatgatagtggaaccaaattatgatttagatgattctggagatatatcttcaactgttatcaatttctctcaaaagtatctttatggaatagacagttgtgttaataaagttgtaatttcaccaaatatttatacagatgaaataaatataacgcctgtatatgaaacaaataatacttatccagaagttattgtattagatgcaaattatataaatgaaaaaataaatgttaatatcaatgatctatctatacgatatgtatggagtaatgatggtaatgattttattcttatgtcaactagtgaagaaaataaggtgtcacaagttaaaataagattcgttaatgtttttaaagataagactttggcaaataagctatcttttaactttagtgataaacaagatgtacctgtaagtgaaataatcttatcatttacaccttcatattatgaggatggattgattggctatgatttgggtctagtttctttatataatgagaaattttatattaataactttggaatgatggtatctggattaatatatattaatgattcattatattattttaaaccaccagtaaataatttgataactggatttgtgactgtaggcgatgataaatactactttaatccaattaatggtggagctgcttcaattggagagacaataattgatgacaaaaattattatttcaaccaaagtggagtgttacaaacaggtgtatttagtacagaagatggatttaaatattttgccccagctaatacacttgatgaaaacctagaaggagaagcaattgattttactggaaaattaattattgacgaaaatatttattattttgatgataattatagaggagctgtagaatggaaagaattagatggtgaaatgcactattttagcccagaaacaggtaaagcttttaaaggtctaaatcaaataggtgattataaatactatttcaattctgatggagttatgcaaaaaggatttgttagtataaatgataataaacactattttgatgattctggtgttatgaaagtaggttacactgaaatagatggcaagcatttctactttgctgaaaacggagaaatgcaaataggagtatttaatacagaagatggatttaaatattttgctcatcataatgaagatttaggaaatgaagaaggtgaagaaatctcatattctggtatattaaatttcaataataaaatttactattttgatgattcatttacagctgtagttggatggaaagatttagaggatggttcaaagtattattttgatgaagatacagcagaagcatatataggtttgtcattaataaatgatggtcaatattattttaatgatgatggaattatgcaagttggatttgtcactataaatgataaagtcttctacttctctgactctggaattatagaatctggagtacaaaacatagatgacaattatttctatatagatgataatggtatagttcaaattggtgtatttgatacttcagatggatataaatattttgcacctgctaatactgtaaatgataatatttacggacaagcagttgaatatagtggtttagttagagttggggaagatgtatattattttggagaaacatatacaattgagactggatggatatatgatatggaaaatgaaagtgataaatattatttcaatccagaaactaaaaaagcatgcaaaggtattaatttaattgatgatataaaatattattttgatgagaagggcataatgagaacgggtcttatatcatttgaaaataataattattactttaatgagaatggtgaaatgcaatttggttatataaatatagaagataagatgttctattttggtgaagatggtgtcatgcagattggagtatttaatacaccagatggatttaaatactttgcacatcaaaatactttggatgagaattttgagggagaatcaataaactatactggttggttagatttagatgaaaagagatattattttacagatgaatatattgcagcaactggttcagttattattgatggtgaggagtattattttgatcctgatacagctcaattagtgattagtgaatag

SEQ ID NO: 2131 - DNA, 25 bp, Artificial Sequence
  Synthetic DNA Sequence
aagcmattgttgtaaattttgaaag

SEQ ID NO: 2132 - DNA, 23 bp, Artificial Sequence
  Synthetic DNA Sequence
tcatatccatagcaatagttcta

SEQ ID NO: 2133 - DNA, 42 bp, Artificial Sequence
  Synthetic DNA Sequence
ccacgcacawaaacttgttttagaagtagcagcwcagcgtgg

SEQ ID NO: 2134 - DNA, 17 bp, Artificial Sequence
  Synthetic DNA Sequence
cgcgtgaagcttctgtg

SEQ ID NO: 2135 - DNA, 20 bp, Artificial Sequence
  Synthetic DNA Sequence
tctcgccgttattcagtttc

SEQ ID NO: 2136 - DNA, 44 bp, Artificial Sequence
  Synthetic DNA Sequence
ccaacgcgtcctcaatcatttctaacttctatggccggcgttgg

SEQ ID NO: 2137 - DNA, 889 bp, Pseudomonas putida
atgatcaccggtgctgcccagatggacggcgcgatcctggtttgctcggccgccgatggtccgatgccrcaaacccgtgagcacatcctgctgtcccgtcaggtaggcgttccgtacatcgtggtcttcctgaacaaggccgacctggtagacgacgctgagctgctggaactggtcgagatggaagttcgcgacctgctgtccacctacgacttcccaggcgacgacactccgatcatcatcggttccgctcgtatggccctggaaggcaaagacgacaacgaaatgggcactaccgctgtcaagaagctggtagaaactctggatgcctacatccctgagccagttcgtgccatcgaccagccgttcctgatgccgatcgaagacgtgttctcgatctcgggtcgtggtaccgttgttaccggtcgtatcgagcgtggcatcgttcgcgttcaggatccgctggaaatcgttggtctgcgtgacaccaccaccaccacctgcaccggtgttgagatgttccgcaagctgctggacgaaggtcgtgctggcgagaactgcggcgttctgctgcgtggtaccaagcgtgacgacgttgagcgtggccaggttctggtcaagccaggttcggtcaagccgcacaccaagttcaccgcagaagtctacgtcctgtcgaaggaagaaggcggccgtcacactccgttcttcaaaggctaccgtccacagttctacttccgtaccactgacgtgaccggtaactgcgaactgccggaaggcgttgaaatggtaatgccaggtgacaacattcagatgactgttaccctgatcaagaccatcgcaatggaagacggtctgcgcttcgctatccgtgaaggcggtcgtaccgtcg

SEQ ID NO: 2138 - DNA, 900 bp, Pseudomonas aeruginosa
  strain PAO-1
aacatgatcaccggtgctgcccagatggacggcgcgatcctggtttgctcggctgccgacggccccatgccgcagacccgcgagcacatcctgctgtcccgccaggtaggcgttccctacatcgtcgtgttcctgaacaaggccgacatggtcgacgacgccgagctgctggaactggtcgagatggaagttcgcgatctgctgaacacctacgacttcccgggcgacgacactccgatcatcatcggttccgcgctgatggcgctggaaggcaaggatgacaacggcatcggcgtaagcgccgtgcagaagctggtagagaccctggactcctacattccggagccggttcgtgccatcgaccagccgttcctgatgccgatcgaagacgtgttctcgatctccggccgcggtaccgtggtaaccggtcgtgtagagcgcggcatcatcaaggtccaggaagaagtggaaatcgtcggcatcaaggcgaccaccaagactacctgcaccggcgttgaaatgttccgcaagctgctcgacgaaggtcgtgctggtgagaacgttggtatcctgctgcgtggcaccaagcgtgaagacgtagagcgtggccaggttctggccaagccgggcaccatcaagccgcacaccaagttcgagtgcgaagtgtacgtgctgtccaaggaagaaggtggtcgtcacaccccgttcttcaagggctaccgtccgcagttctacttccgtaccaccgacgtgaccggtaactgcgaactgccggaaggcgtagagatggtaatgccgggcgacaacatcaagatggttgtcaccctgatcgctccgatcgccatggaagatggcctgcgcttcgcgatccgcgaaggcggccgtaccgttggcgccggc

SEQ ID NO: 2139 - DNA, 1398 bp, Campylobacter jejuni
  NCTC 11168
atgcaaggatttatttcacaggtattaggtccggttgttgatgtagattttaacgactatttgcctcaaattaatgaagcaattgttgtaaattttgaaagcgaaggaaaaaaacataaacttgttttagaagtagcagctcatttaggagataatagagttagaactattgctatggatatgacagatggtttggtaaggggcttaaaagctgaggctttaggtgctcccattagtgttcctgttggtgagaaagttttaggaagaattttcaatgttactggagatttgatcgatgaaggtgaagaaatttctttcgataaaaaatgggcaattcatagagatccaccagcttttgaagatcaaagcacaaaaagtgagatttttgaaacagggattaaagttgtagatttacttgctccttatgcaaaaggtggtaaagtaggtctttttggtggtgcaggtgttggtaaaactgttattattatggagcttattcacaatgttgcatttaagcatagcggctattctgtatttgcaggtgtgggtgagagaactcgtgaaggaaatgacctttataatgaaatgaaagaaagtaatgttttagacaaagttgctctatgttatggacaaatgaatgaaccaccaggggcaagaaatcgtattgctttaacaggtttaacaatggctgagtattttagagatgaaatgggtcttgatgtgcttatgtttattgataatatctttagattttcacaatcaggttctgaaatgtcagcacttttaggaagaattccatcagctgtgggttatcaaccaaccttagcaagtgaaatgggtaaattccaagaaagaattacttcaactaaaaaaggctcaatcacttcagttcaagctgtttacgttccagctgatgacttaacagacccagctccagcaactgtttttgctcacttagatgctacaacggttttaaatagagctattgctgaaaagggtatttatcctgcagttgacccacttgactcaacttcaagaatgcttgacccaaatatcattggagaagaacattataaagttgctcgtggtgttcaatcagtgcttcaaaaatacaaagatttacaagatatcatcgccattttaggtatggatgagcttagcgaagaggataaacttgtagttgaaagagcaagaaagattgaaaaattcttatcacaaccatttttcgttgcagaagttttcacaggtagcccaggaaaatatataagccttgaagatacaatagcaggatttaagggaattttagaaggtaaatatgatcatttaccagaaaatgctttctatatggttggaaatatagatgaagctattgcaaaagcggataaattaaaaggttaa

SEQ ID NO: 2140 - DNA, 2157 bp, Streptococcus pneumoniae
  strain 670
atgaacaaaccaacgattctgcgcctaatcaagtatctgagcattagcttcttaagcttggttatcgcagccattgtcttaggcggaggagtttttttctactacgttagcaaggctcctagcctatccgagagtaaactagttgcaacaacttctagtaaaatctacgacaataaaaatcaactcattgctgacttgggttctgaacgccgcgtcaatgcccaagctaatgatattcccacagatttggttaaggcaatcgtttctatcgaagaccatcgcttcttcgaccacagggggattgattccatccgtatcctgggagctttcttgcgcaatctgcaaagtaattccctccaaggtggatcaactctcacccaacagttgattaagttgacttacttttcaacctcgacttccgaccagactatttctcgtaaggctcaggaagcttggttagcgattcagttagaacaaaaagcaaccaaacaggaaatcttgacctactatataaataaggtctacatgtctaatggcaactatggaatgcagacagcagctcaaaactactatggtaaagacctcaataatttaagtttacctcagttagccttgctggctggaatgcctcaggcaccaaaccaatatgacccctattcacatccagaagcagcccaagaccgccgaaacttggtcttatctgaaatgaaaaatcaaggttacatctctgctgaacagtatgagaaagcagtcaatacaccaattactgatggactacaaagtctcaaatcagcaagtaattaccctgcttacatggataattacctcaaggaggtcatcaatcaagtagaacaagaaactggctataaccttctaactactgggatggatgtttacacaaatgtagaccaagaagctcaaaaacatctgtgggatatctacaactccgatcaatacgtctcttaccctgacgatgatttgcaagtcgcatctacggtcgtagatgtttcaaatggtaaagtcatcgcccaacttggagctcgtcaccaagcaagtaacgtttcatttggtaccaaccaagctgtggaaaccaatcgtgactggggttctgctatgaaaccaatcaccgattatgcacctgccatagaatacggtgtttatgattccactgcaactatggttaatgatattccttataactatccgggaacaagcacacctgtctacaactgggatagagcatatttcggtaatattactctgcaatatgctcttcaacaatcacgaaatgtcacagccgttgagactttgaataaggtcggtctagatagagctaaaaccttccttaatggtcttggtatcgactatccaagcatgcattatgcaaacgccatttcaagtaatacaacagaatctaataaacaatacggagcaagtagtgaaaaaatggctgctgcttatgctgcctttgccaacggtggaatttaccacaaacccatgtatatcaataaggtcgtcttcagtgacggtagtaaaaaagaattttcagatgtaggtacacgagctatgaaagaaacaactgcttacatgatgaccgaaatgatgaaaactgtcttggcatacggaactggtcgtggagcctatctcccatggttagcgcaagctggtaagacaggtacttctaactacacagatgatgaaattgaaaaacacatcaagaacactggctatgtagctccagatgaaatgtttgttggttatactcgtaagtattctatggctgtatggacaggttattcgaatcgtttaactcctatcgttggagatggtttcctagttgcagctaaagtttatcgctcaatgataacgtatctatcagaagatactcatccagaagactggacgatgccagacggacttttcagaaacggggaatttgtattcaaaaatggagctcgttctacgtggagctcacctgctccacaacaacccccatcaactgaaagttcaagctcatcatcagatagttcaacttcacagtctagctcaaccactccaagcacaaataatagtacgactaccgatcctaacaataatacgcaacaatcaaatacaacccctgatcaacaaaatcagaatcctcaaccagcacaacca

SEQ ID NO: 2141 - DNA, 18 bp, Artificial Sequence
  Synthetic DNA Sequence
caccagtcacagaaaagc

SEQ ID NO: 2142 - DNA, 20 bp, Artificial Sequence
  Synthetic DNA Sequence
gccttaatttcggatagtgc

SEQ ID NO: 2143 - DNA, 25 bp, Artificial Sequence
  Synthetic DNA Sequence
gagaaagagcccaattatctaatgt

SEQ ID NO: 2144 - DNA, 3075 bp, Staphylococcus aureus
  strain J2870
ttgacaaagaaatatttaaacacccagaatgaaatatcagcattttggaatactcaaaagatatttaaaaaatcaattgacaatagaaaaggacaggaaagttttgttttttatgacggccccccaactgcaaatggccttcctcatgctggccatgttcttggaagagtaatcaaggatttagttgcaagattaaaaactatgcaaggtttttatgtagaaagaaaagcaggatgggatacccatggcttaccagttgaattagaggttgaaaaaaaaattggaattaaaggaaaacaagacattgaaaagtatggaatagaaaattttataaatgaatgtaaaaaaagtgtatttaattatgaaaaagaatggcgggatttttctaaagatttaggatactgggttgacatggactccccctatataactcttgagaataattatattgaaagtgtatggaatatattatctacattccataaaaaaggactattatataagggacataaggtgactccttattgtacacatgatcaaaccgctttaagttctcatgaagtagcgcaaggctataaaaacgttaaagatttatcagctgttgttaaatttcaacttacaaatagtaaagatacttatttcttaagttggactaccactccctggactttgcctgcaaatgtagcattagctataaataaagatcttaattattcaaaaattcgggtagaaaatgagtattatatcttagctacagatctaattaattctataataactgaaaaatacgaaattattgataccttttcaggaagtaatttaattaatttaaaatacattcctccttttgaaagcgacggtttagttaatgcatattacgttgttgatggagaatttgttactaactcagaaggaactggtattgttcatatagcaccagctcatggggaagatgactaccaattggttttagagcgtgatttggatttcttaaatgttataacaagagaaggagtatataatgataggttccctgaattagttggtaataaagctaaaaatagtgatatagaaatcataaaattattatccaaaaaacaacttttatataaaaaacaaaaatatgagcataattatcctcattgttggagatgtggtaatcctttgatatattatgcgatggaaggttggtttattaaaacaactaattttaagaatgaaattattaacaataataataatatagagtggtttccttctcatattaaggaagggagaatgggaaatttcttagaaaatatggttgattggaacattggtagaaatagatattggggaacaccattaaatgtatggatttgcaatgattgtaatcacgaatacgcaccaagtagtattaaggatttacaaaataattccatcaataaaattgatgaagatattgagttgcatagaccttatgttgataatatcactcttagttgccctaagtgtaatgggaaaatgtctcgagtagaagaagtaatcgatgtttggtttgatagcggctctatgccgtttgctcagcatcattatccttttgataaccagaaaatttttaatcaacactttccagctgattttattgcagaaggagttgatcaaacgagaggctggttttacagtttactagtaatttctactattctaaaaggaaaatcttcttataaacgtgctttatctttaggacatattctagacagtaatggtaaaaaaatgtctaaaagtaaaggaaacgttattaatccaactgaattaattaataagtacggagccgattctttaagatgggccttaatttcggatagtgctccatggaataacaaaagattctcagaaaatatagtagctcagaccaaatcgaaatttatagatacgcttgataatatttataaattttataatatgtataataaaatagatcactataatcctaataatgaaattacaaaaagtagaaatacattagataattgggctctttctcgcttaaacaccttaataaaagaaagtaatatttatgtaaataattacgatttcacttccgcagccagattaattaacgaatataccaatacaataagtaattggtatatcggagattcgagaggacgattttgggaacaaggaatttctaacgataaaaaagatgcgtacaatacgctttatgaaattttaacaactttatcaagactagtggctccatttgttccatttatatctgaaaaaatccattataatttgactggaaaaagtgtgcatttacaagattatccacaatataaagaaagttttattaatcaagcattggaagatgaaatgcataccgttataaaaattgtagaattatctagacaggctcgcaaaaatgcagatttaaaaattaagcaacctttatcgaaaatggtgattaaacctaatagtcaattaaacttaagttttttacctaattactattcaataataaaagacgaattaaatataaaaaacattgaattaactgataatattaatgactatattacctatgagcttaaattgaatttttcttctgtgggaccaaaactagggaacaaaacgaaaaatattcaaacattgatagactccctatcagagtatgataaaaaaagtttaattgagtctaataacttcaaaagtttatcttctgatgctgagttaactaaggatgattttataattaaaaccttacctaaggatagttatcaactcagtgaagataatgactgcgttatattattagataaaaatttatctcctgaattaattcgcgaaggacatgctagagagctcattagattaattcaacaattaagaaaaaagaaaaatttaccaataaatcaacgtattgatatttatatcggtgtaactggggaattattagaatcaataaaaaccaataaaaatatgtttaaagaaaatttcgtgattaaaaatatacacttaaatgttatagatgaatatgaaaatactattcattttaataataaagaaataaaaatttccttattatattaa

SEQ ID NO: 2145 - DNA, 22 bp, Artificial Sequence
  Synthetic DNA Sequence
gcaagatgtggcgtgttacggt

SEQ ID NO: 2146 - DNA, 23 bp, Artificial Sequence
  Synthetic DNA Sequence
ggggcgaagaagttgtccatatt

SEQ ID NO: 2147 - DNA, 660 bp, Escherichia coli
atggagaaaaaaatcactggatataccaccgttgatatatcccaatggcatcgtaaagaacattttgaggcatttcagtcagttgctcaatgtacctataaccagaccgttcagctggatattacggcctttttaaagaccgtaaagaaaaataagcacaagttttatccggcctttattcacattcttgcccgcctgatgaatgctcatccggaattccgtatggcaatgaaagacggtgagctggtgatatgggatagtgttcacccttgttacaccgttttccatgagcaaactgaaacgttttcatcgctctggagtgaataccacgacgatttccggcagtttctacacatatattcgcaagatgtggcgtgttacggtgaaaacctggcctatttccctaaagggtttattgagaatatgtttttcgtctcagccaatccctgggtgagtttcaccagttttgatttaaacgtggccaatatggacaacttcttcgcccccgttttcaccatgggcaaatattatacgcaaggcgacaaggtgctgatgccgctggcgattcaggttcatcatgccgtctgtgatggcttccatgtcggcagaatgcttaatgaattacaacagtactgcgatgagtggcagggcggggcgtaa

SEQ ID NO: 2148 - DNA, 22 bp, Artificial Sequence
  Synthetic DNA Sequence
cagattaaatgcggattcagcc

SEQ ID NO: 2149 - DNA, 23 bp, Artificial Sequence
  Synthetic DNA Sequence
atcaggtaaatcatcagcggata

SEQ ID NO: 2150 - DNA, 642 bp, Escherichia coli
  strain K12
atgaattttacccggattgacctgaatacctggaatcgcagggaacactttgccctttatcgtcagcagattaaatgcggattcagcctgaccaccaaactcgatattaccgctttgcgtaccgcactggcggagacaggttataagttttatccgctgatgatttacctgatctcccgggctgttaatcagtttccggagttccggatggcactgaaagacaatgaacttatttactgggaccagtcagacccggtctttactgtctttcataaagaaaccgaaacattctctgcactgtcctgccgttattttccggatctcagtgagtttatggcaggttataatgcggtaacggcagaatatcagcatgataccagattgtttccgcagggaaatttaccggagaatcacctgaatatatcatcattaccgtgggtgagttttgacggatttaacctgaacatcaccggaaatgatgattattttgccccggtttttacgatggcaaagtttcagcaggaaggtgaccgcgtattattacctgtttctgtacaggttcatcatgcagtatgtgatggctttcatgcagcacggtttattaatacacttcagctgatgtgtgataacatactgaaataa

SEQ ID NO: 2151 - DNA, 23 bp, Artificial Sequence
  Synthetic DNA Sequence
atatttcagcattaccttgggtt

SEQ ID NO: 2152 - DNA, 23 bp, Artificial Sequence
  Synthetic DNA Sequence
tacacaactcttgtagccgatta

SEQ ID NO: 2153 - DNA, 642 bp, Shigella flexneri
atgaactatacaaaatttgatgtaaaaaattgggttcgccgtgagcattttgagttttatcggcatcgtttaccatgtggttttagcttaacaagcaaaattgatatcacgacgttaaaaaagtcattggatgattcagcgtataagttttatccggtaatgatctatctgattgctcaggccgtgaatcaatttgatgagttgagaatggcgataaaagatgatgaattgatcgtatgggattcagtcgacccacaattcaccgtattccatcaagaaacagagacattttcagcactgagttgcccatactcatccgatattgatcaatttatggtgaattatttatcggtaatggaacgttataaaagtgataccaagttatttcctcaaggggtaacaccagaaaatcatttaaatatttcagcattaccttgggttaattttgatagctttaatttaaatgttgctaattttaccgattattttgcacccattataacaatggcaaaatatcagcaagaaggggatagactgttattgccgctctcagtacaggttcatcatgcagtttgtgatggcttccatgttgcacgctttattaatcggctacaagagttgtgtaacagtaaattaaaataa

SEQ ID NO: 2154 - DNA, 20 bp, Artificial Sequence
  Synthetic DNA Sequence
cgccattcagagtttaggac

SEQ ID NO: 2155 - DNA, 23 bp, Artificial Sequence
  Synthetic DNA Sequence
ttccataccgttgcgtatcactt

SEQ ID NO: 2156 - DNA, 624 bp, Clostridium perfringens
  strain CP590
atggtatttgaaaaaattgataaaaatagttggaacagaaaagagtattttgaccactactttgcaagtgtaccttgtacatacagcatgaccgttaaagtggatatcacacaaataaaggaaaagggaatgaaactatatcctgcaatgctttattatattgcaatgattgtaaaccgccattcagagtttaggacggcaatcaatcaagatggtgaattggggatatatgatgagatgataccaagctatacaatatttcacaatgatactgaaacattttccagcctttggactgagtgtaagtctgactttaaatcatttttagcagattatgaaagtgatacgcaacggtatggaaacaatcatagaatggaaggaaagccaaatgctccggaaaacatttttaatgtatctatgataccgtggtcaaccttcgatggctttaatctgaatttgcagaaaggatatgattatttgattcctatttttactatggggaaatattataaagaagataacaaaattatacttcctttggcaattcaagttcatcacgcagtatgtgacggatttcacatttgccgttttgtaaacgaattgcaggaattgataaatagttaa

SEQ ID NO: 2157 - DNA, 27 bp, Artificial Sequence
  Synthetic DNA Sequence
ccacagaaattgatattagtgttttat

SEQ ID NO: 2158 - DNA, 21 bp, Artificial Sequence
  Synthetic DNA Sequence
tcgctattgtaaccagttcta

SEQ ID NO: 2159 - DNA, 651 bp, Staphylococcus aureus
atgaactttaataaaattgatttagacaattggaagagaaaagagatatttaatcattatttgaaccaacaaacgacttttagtataaccacagaaattgatattagtgttttataccgaaacataaaacaagaaggatataaattttaccctgcatttattttcttagtgacaagggtgataaactcaaatacagcttttagaactggttacaatagcgacggagagttaggttattgggataagttagagccactttatacaatttttgatggtgtatctaaaacattctctggtatttggactcctgtaaagaatgacttcaaagagttttatgatttatacctttctgatgtagagaaatataatggttcggggaaattgtttcccaaaacacctatacctgaaaatgctttttctctttctattattccatggacttcatttactgggtttaacttaaatatcaataataatagtaattaccttctacccattattacagcaggaaaattcattaataaaggtaattcaatatatttaccgctatctttacaggtacatcattctgtttgtgatggttatcatgcaggattgtttatgaactctattcaggaattgtcagataggcctaatgactggcttttataa

SEQ ID NO: 2160 - DNA, 23 bp, Artificial Sequence
  Synthetic DNA Sequence
ttttgaacactattttaaccagc

SEQ ID NO: 2161 - DNA, 23 bp, Artificial Sequence
  Synthetic DNA Sequence
gatttaacttatcccaataacct

SEQ ID NO: 2162 - DNA, 648 bp, Staphylococcus aureus
atgacttttaatattatcaaattagaaaattgggatagaaaagaatattttgaacactattttaaccagcaaactacgtatagcattactaaagaaattgatattactttgtttaaagatatgataaaaaagaaaggatatgaaatttatccttctttgatttatgcaattatggaagttgtaaataaaaataaagtgtttagaacaggaattaatagtgagaataaattaggttattgggataagttaaatcctttgtatacagtttttaataagcaaactgaaaaatttactaacatttggactgaatctgataacaacttcacttctttttataataattataaaaatgacttgcttgaatataaagataaagaagaaatgtttcctaaaaaaccgatacctgaaaacaccataccgatttcaatgattccttggattgattttagttcatttaatttaaacattggtaacaatagcaactttttattgcctattattacgataggtaaattttatagtgagaataataaaatttatataccagttgctttgcagcttcatcatgctgtatgtgatggttaccatgcttcattatttatgaatgaatttcaagatataattcataaggtagatgattggatttag

SEQ ID NO: 2163 - DNA, 24 bp, Artificial Sequence
  Synthetic DNA Sequence
accttcatcctaccgatgtgggtt

SEQ ID NO: 2164 - DNA, 23 bp, Artificial Sequence
  Synthetic DNA Sequence
caacgacaccagcactgccattg

SEQ ID NO: 2165 - DNA, 1215 bp, Salmonella typhimurium
  strain H3380
atgaccaccacacgccccgcgtgggcctatacgctgccggcagcactgctgctgatggctcctttcgacatcctcgcttcactggcgatggatatttatctccctgtcgttccagcgatgcccggcatcctgaacacgacgcccgctatgatccaactcacgttgagcctctatatggtgatgctcggcgtgggccaagtgatttttggtccgctctcagacagaatcgggcgacggccaattctacttgcgggcgcaacggctttcgtcattgcgtctctgggagcagcttggtcttcaactgcaccggcctttgtcgctttccgtctacttcaagcagtgggcgcgtcggccatgctggtggcgacgttcgcgacggttcgcgacgtttatgccaaccgtcctgagggtgtcgtcatctacggccttttcagttcgatgctggcgttcgtgcctgcgctcggccctatcgccggagcattgatcggcgagttcttgggatggcaggcgatattcattactttggctatactggcgatgctcgcactcctaaatgcgggtttcaggtggcacgaaacccgccctctggatcaagtcaagacgcgccgatctgtcttgccgatcttcgcgagtccggctttttgggtttacactgtcggctttagcgccggtatgggcaccttcttcgtcttcttctcgacggctccccgtgtgctcataggccaagcggaatattccgagatcggattcagctttgccttcgccactgtcgcgcttgtaatgatcgtgacaacccgtttcgcgaagtcctttgtcgtcagatggggcatcgcaggatgcgtggcgcgtgggatggcgttgcttgtttgcggagcggtcctgttggggatcggcgaactttacggctcgccgtcattcctcaccttcatcctaccgatgtgggttgtcgcggtcggtattgtcttcacggtgtccgttaccgcgaacggcgctttggcagagttcgacgacatcgcgggatcagcggtcgcgttctacttctgcatccaaagcctgatagtcagtatcgtcgggacattggcggtgacgctgttaaacggcgatacagcgtggcccgtgatttgttacgccacggcaatggcagtgctggtgtcgttggggctggcgctccttcgatcccgtgatgctgccaccgagaagtcgccagtcgtctag

SEQ ID NO: 2166 - DNA, 18 bp, Artificial Sequence
  Synthetic DNA Sequence
gacaaaccattcctgctg

SEQ ID NO: 2167 - DNA, 18 bp, Artificial Sequence
  Synthetic DNA Sequence
cagcagctgggcggcggt

SEQ ID NO: 2168 - DNA, 23 bp, Artificial Sequence
  Synthetic DNA Sequence
catcaaagttggtgaagaagttg

SEQ ID NO: 2169 - DNA, 18 bp, Artificial Sequence
  Synthetic DNA Sequence
cccgtttgcgaaaggtgg

SEQ ID NO: 2170 - DNA, 19 bp, Artificial Sequence
  Synthetic DNA Sequence
acgtgacgttgacaaacca

SEQ ID NO: 2171 - DNA, 20 bp, Artificial Sequence
  Synthetic DNA Sequence
tcgttggattaactgaagaa

SEQ ID NO: 2172 - DNA, 20 bp, Artificial Sequence
  Synthetic DNA Sequence
gtgttgaaatgttccgtaaa

SEQ ID NO: 2173 - DNA, 24 bp, Artificial Sequence
  Synthetic DNA Sequence
aagaaaaaatcttcgaactggcta

SEQ ID NO: 2174 - DNA, 15 bp, Artificial Sequence
  Synthetic DNA Sequence
tctacacggccggtg

SEQ ID NO: 2175 - DNA, 16 bp, Artificial Sequence
  Synthetic DNA Sequence
ccgccataccccgttt

SEQ ID NO: 2176 - DNA, 24 bp, Artificial Sequence
  Synthetic DNA Sequence
cggcattaccatttccacaccttt

SEQ ID NO: 2177 - DNA, 49 bp, Artificial Sequence
  Synthetic DNA Sequence
ggcacggacaaaccattcctgctgcctatcgaagacgtgttcccgtgcc

SEQ ID NO: 2178 - DNA, 38 bp, Artificial Sequence
  Synthetic DNA Sequence
ggcacgacaaaccattcctgctgcctatcgaacgtgcc

SEQ ID NO: 2179 - DNA, 39 bp, Artificial Sequence
  Synthetic DNA Sequence
ggcagctctacttccgtaccactgacgtaaccggctgcc

SEQ ID NO: 2180 - DNA, 15 bp, Artificial Sequence
  Synthetic DNA Sequence
ttcgccggcgtgggc

SEQ ID NO: 2181 - DNA, 15 bp, Artificial Sequence
  Synthetic DNA Sequence
agcgccacgcgcagg

SEQ ID NO: 2182 - DNA, 42 bp, Artificial Sequence
  Synthetic DNA Sequence
gcgcgccaacgacttctaccacgaaatggaagagtcgcgcgc

SEQ ID NO: 2183 - DNA, 817 bp, Alcaligenes faecalis subsp. faecalis; identical to SEQ ID NO: 1572
  ref <308>: DATABASE ACCESSION NUMBER: ATCC 8750

SEQ ID NO: 2184 - DNA, 1652 bp, Campylobacter coli
  ref <308>: DATABASE ACCESSION NUMBER: ATCC 43479
tacaattgaagttgaaagatctatgcgtgttcttgatggtgctgttgcggtattttgttcagtgggtggggtgcagcctcaaagtgaaacagtttggagacaagcaaataaatatggtgttccaagaatagtatttgtaaataaaatggatagaatcggtgcaaatttctacaatgtagaagatcaaattcgcaaccgtttaaaagctaatccagttccacttcaaattccaatcggtgctgaggataattttaaaggcgtaatcgatcttgtaactatgaaagctttagtttgggaagatgatactaagccaacggattatgtagaaaaagaaattccagctgaacttaaagaaaaggcagaagaatatcgcacaaaaatgatagaagcagtttctgaaacttcagatgagttgatggaaaaatatttaggtggagaagaattaagccttgaagagattaaaacagggattaaagcaggatgtttaagtctttctatcgttcctatgctttgcggtacagcgtttaaaaataaaggggttcaacctttgcttgatgctgttgtggcttatttaccagctcctgatgaagttgctaatatcaaaggggaatatgaagacggcacagaagtttctgtaaaatcaactgatgatggcgaatttgcaggacttgcatttaaaattatgacagatccatttgtaggacaacttactttcgtgcgtgtttatcgtggatgtttagaaagcggttcttatgcttataactcaaccaaagataaaaaagaaagaattggtcgtttgttaaaaatgcactctaataaaagagaagaaattaaagttctttacgcaggagaaatcggtgcagttgtaggacttaaagatactttaacaggggatactcttgcaagtgaaaaagataaagtaattcttgaaagaatggatttcccagacccagttatttctgttgcagtagamccaaaaactaaagcagatcaagaaaaaatgtctattgcactaaataaattagctcaagaagatccaagctttagagtttctacggatgaagaaagtggtcaaactatcatttcaggtatgggtgaattacaccttgaaattattgttgatcgtatgcttcgtgaatttaaagtggaagctgaagtgggacaacctcaagttgcttatcgtgaaactatcagaaaaactgttgagcaagaatacaaatacgctaagcaatcaggcggtcgtggtcagtatggacatgtattcttacgccttgagccacttgagccaggaagtggatacgagtttgttaacgacatcaaaggtggggtaattccaaaagaatatattcctgcagtagataagggtgttcaagaagcattgcaaaatggtgttttagcaggttatccagtagaagatgttaaagtaactgtttatgatggaagttatcacgaggtggattcatctgagatggcatttaaacttgctgcttctatgggatttaaagagggtgctagaaaagcaggtgctgtgatcttagagcctatgatgaaagttgaagtagaaactcctgaagattacatgggcgatgttattggcgatcttaataagcgtcgtggtcaagtaaatagcatggatgaaagaggtggtaata

SEQ ID NO: 2185 - DNA, 820 bp, Succinivibrio dextrinosolvens; identical to SEQ ID NO: 1574
  ref <308>: DATABASE ACCESSION NUMBER: ATCC 19716

SEQ ID NO: 2186 - DNA, 44 bp, Artificial Sequence
  Synthetic DNA Sequence
acgcgctcaaagcagaagtatacgtattatcaaaagacgcgcgt

SEQ ID NO: 2187 - DNA, 1612 bp, Campylobacter jejuni subsp. jejuni
  ref <308>: DATABASE ACCESSION NUMBER: ATCC 33292
cagtgggtggggtgcagcctcaaagtgaaacagtttggagacaagcaaataaatatggtgttccaagaatagtatttgtaaacaaaatggatagaatcggtgcaaatttctacaatgtagaagatcaaattcgcaaccgtttaaaagctaatccagttccacttcaaattccaatcggtgctgaggataattttaaaggcgtaatcgatcttgtaactatgaaagctttagtttgggaagatgatactaagccaacggattatgtagaaaaagaaattccagctgaacttaaagaaaaggcagaagaatatcgcacaaaaatgatagaagcagtttctgaaacttcagatgagttgatggaaaaatatttaggcggagaagaattaagccttgaagagattaaaacagggattaaagcaggatgtttaagtctttctatcgttcctatgctttgcggtacagcgtttaaaaataaaggggttcaacctttacttgatgctgttgtggcttatttaccagctcctgatgaagtggcaaatatcaagggtgaatatgaagatggcacagaagtttctgtaaaatcaactgatgatggcgagtttgcaggacttgcatttaaaattatgacagatccatttgtaggacaacttactttcgtgcgtgtttatcgcggttgtttagaaagtggttcttatgcttataactcaactaaagataaaaaagaaagaattggtcgtttgttaaaaatgcactctaaccaaagagaagagattaaagtgctttacgcaggcgaaattggtgctgttgtaggacttaaagatactttaacaggggatactcttgtaagtgaaaaagataaggtaatccttgaaagaatggattttccagatccagttatttctgttgcagttgagccaaaaactaaagcagatcaagaaaaaatgtctattgctttaaataaattagcacaagaagatccaagttttagagtttctacagatgaagaaagtggccaaactatcatttcaggtatgggtgagttacaccttgaaattatcgttgatagaatgcttcgtgaatttaaagttgaagctgaagtaggtcaaccacaagttgcttatcgcgaaactattagaaaaactgttgaacaagaatacaaatacgctaaacaatcaggtggtcgtggtcagtatggacatgtattcttacgccttgaaccacttgagccaggtagtggatatgaatttgttaatgatatcaaaggtggagtaattccaaaagaatacattcctgcagttgataaaggtgttcaagaagcattacaaaatggtgttttagcaggttatcctgtggaagatgttaaagtaactgtttatgatggaagttatcacgaggtggattcatctgagatggcgtttaaacttgctgcttctatgggctttaaagaaggtgctagaaaagcaggtgctgtgatcttagagcctatgatgaaagttgaagtagaaactcctgaagattacatgggtgatgttattggagatcttaacaaacgccgtggtcaagtaaatagcatggatgagcgtggtggaaataaaatcatcacagcattttg

SEQ ID NO: 2188 - DNA, 1667 bp, Campylobacter jejuni subsp. jejuni
  ref <308>: DATABASE ACCESSION NUMBER: ATCC 33560
acaattgaagttgaaagatctatgcgtgttcttgatggtgctgttgcggtattttgttcagtgggtggggtgcagcctcaaagtgaaacagtttggagacaagcaaataaatatggtgttccaagaatagtatttgtaaataaaatggatagaatcggtgcaaatttctacaatgtagaagatcaaattcgcaaccgtttaaaagctaatccagttccacttcaaattccaattggtgctgaggataattttaaaggcgtaatcgatcttgtaactatgaaagctttagtttgggaagatgatactaagccaacggattatgtagaaaaagaaattccagctgaacttaaagaaaaggcagaagaatatcgcacaaaaatgatagaagcagtttctgaaacttcagatgagttgatggaaaaatatttaggcggagaagaattaagccttgaagagattaaaacagggattaaagcaggatgtttaagtctttctatcgttcctatgctttgcggtacagcgtttaaaaataaaggggttcaacctttgcttgatgctgttgtggcttatttaccagctcctgatgaagtggcaaatatcaagggtgaatatgaagatggcacagaagtttctgtaaaatcaactgatgatggcgagtttgcaggacttgcatttaaaatcatgacagatccatttgtaggacaacttactttcgtgcgtgtttatcgcggttgtttagaaagcggttcttatgcgtataactcaactaaagataaaaaagaaagaattggtcgtttgttaaaaatgcactctaacaaaagagaagagattaaagtgctttacgcaggcgaaattggtgctgttgtaggacttaaagatactttaacaggggatactcttgcaagtgaaaaagataaggtaatccttgaaagaatggattttccagatccagttatttctgttgcagttgagccaaaaactaaagctgatcaagaaaaaatgtctattgctttaaataaattagcacaagaagatccaagttttagagtttctacagatgaagaaagtggtcaaactatcatttcaggtatgggtgagttacaccttgaaattatcgttgatagaatgcttcgtgaatttaaagttgaagctgaagtaggtcaaccacaagttgcttatcgcgaaactattagaaaaactgttgaacaagaatacaaatacgctaaacaatcaggtggtcgtggtcagtatggacatgtattcttacgccttgaaccacttgagccaggtagtggatatgaatttgttaatgatatcaaaggtggggtaattccaaaagaatacattcctgcagttgataaaggtgttcaagaagcattacaaaatggtgttttagcaggttatcctgtggaagatgttaaagtaactgtttatgatggaagttatcacgaggtggattcatctgagatggcgtttaaacttgctgcttctatgggctttaaagaaggtgctagaaaagcaggcgctgtgatcttagagcctatgatgaaagttgaagtagaaactcctgaagattatatgggtgatgttattggagatcttaacaaacgccgtggtcaagtaaatagcatggatgagcgtggtggaaataaaatcatcacagcatt

SEQ ID NO: 2189 - DNA, 1255 bp, Leishmania guyanensis; identical to SEQ ID NO: 859
  ref <308>: DATABASE ACCESSION NUMBER: ATCC 50126

SEQ ID NO: 2190 - DNA, 1248 bp, Trypanosoma brucei subsp. brucei
  strain EATRO795
gcccttgacgttgttgacaaacttggccgtgatgagcctcttactcttgagatcgtgcagcatcttgacgcccacacgggccgctgtatcgcgatgcaaacgacggatctcctcaaactgaaggcaaaggtcgtttcgacaggtggcaacatttccgttcctgtcggccgggaaacactaggtcgtatcttcaacgtgcttggagacgctattgaccagcgcggccccgttggtgagaaactgcgcatgcccatccatgccgtggctcccaagcttgcggaccaggccgctgaggatgcggtgctcacaactggtattaaggtgattgatctcattctcccttactgcaaaggtggaaaaattggcctctttgggggtgcgggtgtgggcaaaaccgtcattattatggagctcattaacaacgttgccaagggtcacggtggtttctctgtcttcgctggtgttggtgagcgtacccgtgagggaacggatttgtatcttgagatgatgcagtctaaggttattgaccttaagggtgagtccaaatgtgtgttggtgtacggtcagatgaacgagcccccaggtgcccgtgcgcgtgttgcgcagtcggctctgacgatggctgagtacttccgtgatgtggagggccaagatgtgcttctttttatcgacaatatttttcgtttcactcaggctaactccgaggtgtcggcgcttctgggtcgtattcccgccgctgttggctaccagcctaccctcgctgaggatctagggcagttgcaggagcgtattacctcaacaacgaaaggctccattacttctgtgcaggccgtatacgtgccggccgatgacattaccgatccagctccagcaacaaccttctcacatctggacgccacaactgtgttggaccgtgctgttgccgagtctggtatctaccccgctgttaacccactggaatgcgcctcgcgtatcatggaccccgacgttatcagtgtggatcactacaatgttgcacaagatgtggtacagatgctcaccaagtacagggaattacaggatatcattgctgtccttggtatcgacgagctaagcgaggaggacaaacttatcgtggaccgtgcgcgtaagttggtgaagttcctctcccagccattccaagttgctgaggtcttcacaggaatgactggccattacgtgcagttggatgacaccatcgattccttttctggtctcctcatgggtacg

SEQ ID NO: 2191 - DNA, 440 bp, Aspergillus nidulans
  strain WSA-176
gagctgattgtaagtcatcgaccacttgatatatgaatacatctaacagtagtagaacaacatcgccaaggctcacggtggttactccgtcttcactggtgtcggtgagcgtactcgtgagggtaacgatctgtaccacgaaatgcaggagactggtgtcattcagctcgacggcgaatccaaggtgtctcttgtgttcggtcagatgaacgagcccccaggtgctcgtgcccgtgtcgcccttactggtctgaccatcgccgaatacttccgtgacgaggagggtcaggacgtgctgctcttcattgacaacattttccgtttcacccaggccggttccgaggtgtctgcccttcttggtcgtatcccctctgccgtcggttaccagcccactctggccgtcgacatgggtggtatgcaggaacgtattaccaccacca

SEQ ID NO: 2192 - DNA, 1262 bp, Leishmania panamensis
  ref <308>: DATABASE ACCESSION NUMBER: ATCC 50158
gctgacggcgctggacgtgacggaggacctcggccgcgatgagccgctgacgctggagatcgtgcagcacttggatgcgaacaccggccgctgcattgcgatgcagacgacggacctgctgaagctgaagtcgaaggttgtgtcgaccggcggcaacatctccgtgccggtgggccgcgagacgctgggccgcatcttcaacgtgctgggcgacgcgattgaccaccgcggccccgtgtgcgagaagatgcgcatggcgatccacgccgaggcgccgaagctggcggaccaggctgcggaggacacgatcctgacgaccggcatcaaggtgatcgacctgattctgccctactgcaagggcggcaagatcggcctgttcggcggtgccggtgtgggcaagactgtgatcatcatggagctgatcaacaacgtcgcgaaggggcacggcggcttctccgtgttcgccggcgttggcgagcgcacgcgcgagggcacggacctgtacctggagatgatgcagtcaaaggtgattgacctgaagggcgagtcgaagtgcgtgcttgtgtacgggcagatgaacgagcccccgggtgcgcgcgcgcgcgttgcgcagtctgcgctgacgatggccgagtacttccgcgacgtggagggccagaacgtgctgctgttcatcgacaacatcttccgcttcacgcaggcgaactccgaggtgtctgcgctgctgggccgcatcccggccgccgtgggttaccagccgacgcttgcggaggatcttggcatgctgcaggagcgcattacgtcgacgacgaagggatcgattacgtctgtgcaggctgtgtacgtgcctgcggatgatatcacggaccccgcgcccgcgacgacgttctcgcacctggacgcgacgactgtgctggaccgcgcggtggcggagtcgggcatctaccctgccgtgaacccgctggagtgcgcgtcgcgcatcatggaccccgatgtgatcgacgtggaccattacaacgttgcacaggatatcgtccagatgctgaccaagtacaaggagctgcaggacatcattgcggtgcttggcatcgacgagctgagcgaggaggacaaggtcgtggtggaccgcgcgcgcaaggtgacgcggttcctgtcgcagccgttccaggttgcggaggtgttcaccggcatgacgggccactacgtgcagctgagcgacacggtggagtcgttctctggcctgctgatggggtcgtacgacc

SEQ ID NO: 2193 - DNA, 912 bp, Aspergillus nidulans
  strain WSA-176
ttccgatggtcaaatgtacgattgatattccttccagccagtcaggataacagctgataccagttgcaaataggccccagactcgtgagcacttgttgcttgcccgtcaggttggtgtccagaagatcgttgtcttcgtcaacaaggttgacgctgtcgatgaccctgagatgttggagcttgttgagctcgagatgcgtgagctcctcaacacttacggtttcgagggagaggagacccctatcatcttcggttccgccctgtgcgctctcgaaggccgccgcgaggacattggtactcagcgtattgactccctcctcgaggccgttgacacttggatccctaccccccagcgtgacttggacaagcccttcctgatgtccattgaggaagttttctccattggtggtcgtggtaccgtcgcctctggtcgtgtcgagcgtggtctcctcaagaaggataccgaagttgaaattcacggtgctgatggtattctgaagaccaaggtcaccgacattgagaccttcaagaagagctgcgatgagtctcgtgctggtgacaactccggtcttctcctccgtggtatccgtcgtgaggatgttcgtcgtggtatggtcatcgctgcccctggctccatcaaggcctccaagaagttcatggtctccatgtacgtcttgactgaggctgaaggtggccgcaagaacggcttcggtgccaactaccgcccccaggctttcatccgcactgctggtaagtttcgaactatttgattcattgatcacgtccctaactgttactttagacgaggcttgcgaccttcatttccctgatgaggccgacaaggaccgccacgtcatgcccggtgacaacgtcgaaatggtcctcaacctcaacaaccccgttgctgctgag

SEQ ID NO: 2194 - DNA, 887 bp, Aureobasidium pullulans
  strain WSA-234
tcatcgtcgtcgccgcttctgacggtcagatgccccagaccagagagcacttgcttctcgcccgtcaggtcggtatccagaagattgtcgtcttcgtcaacaaggtcgacgccatcgaggacaaggagatgcttgagctcgtcgagatggagatgcgtgagctcctcagcagctacggcttcgagggtgacgagacccccatcgtcatgggttccgctctttgtgcccttgagaaccgccagcccgagattggaaccacccagatcgacaacctgatgaacgctgtcgacgagtggatccccactccccagagagatcttgagaagcccttcctcatgtccgttgaggatgtcttctctatccccggtcgtggtactgtcgtttctggccgtgttgagcgtggtaccctgaagaaggattccgaaatcgagcttgtcggcaagaacaaggtccccatcaagaccaaggtcaccgacatcgagaccttcaagaagtcttgcgacgagtcccgcgctggtgacaactccggtcttctgctccgtggtatcaagcgtgaggatgtcaaccgtggtatggttgtcgtcaagcccggtaccgtcacctcgcacaagaagttcctcgtctccatgtacgtcctgaccaaggaggagggtggtcgtcacactggtttccacggaaactaccgtccccagatcttcatccgtaccgctggtaagtcctgactttgaactgctgaccaattttcgcatctctaacatgttttacagacgaggctgccgctattgactggcccgaaggcaccgaggacgctgactccaagatggtcatgcccggtgacaacgtcgagatggtctgctctcttcacagacctcttgccgttgaacagg

SEQ ID NO: 2195 - DNA, 984 bp, Emmonsia parva
  ref <308>: DATABASE ACCESSION NUMBER: ATCC 10784
tgacggccaaatgtaggactcttgcgcgggactgactgattggggggaatccattttttcttttttctttttctttttgagtacatgattatactaatatttggataacgtaccaggcctcaaacacgtgaacatttactccttgcccgacaagtcggtgtccagaagatcgtcgttttcgtaaacaaggtcgatgttctcgaagataaggagatgttggagcttgtcgagttggaaatgagagagctcttgaacacctacggattcgagggtgaggaaacgcccatcatcttcggttctgccctttgtgccatggagggccgcgagcctgagctgggcgagaagagaattgatgaattgctcgacgctgttgatagctggatccctacgccgcaacgtgatacggaaaaacccttcctaatgtccattgaggaagtgttctccatctccggtcgtggaaccgttgcctccggccgtgttgagcgtggtgtcctcaagaaggattccgaagtcgagcttgttggcggcggcgtcgccccaatcaggaccaaggtaaccgatatcgaaaccttcaagaagtcctgcgacgagtccagggctggagacaactctggccttttgttgcgtggtgtcaagcgtgaggatatccgccgtggtatggtcgttgtcgttcctggcagcgtcaaggcccacgacaagttcttggtgtccatgtatgttctgaccgaagccgagggtggtcgccgaactggattcggccaaaactatcgtcctcaaatgtttatccgcacagctggtacgtaacgtataatgcctctcctcttcatatataccaccccccccaccactgactccctgactcttcgattacagacgaggccgccgatctcagcttccctgacgcagcagacgaaaccaaactggttatgcccggtgacaacgtcgagatgatcctcaagacacaccgccccatagctgccgaag

SEQ ID NO: 2196 - DNA, 806 bp, Exserohilum rostratum
  strain WSA-215
gccgcctctgacggccaaatgccccagacccgtgagcacttgctgcttgctcgccaggtcggtgttcagaagattgttgtttttgtcaacaaggtcgatgccgtcgaggacaaggagatgttggagctcgttgagatggagatgcgtgagttgctcagcagctatggcttcgagggcgatgagactcccattgtcatgggctccgctctctgcgccatcgagggccgtgagcccgaaattggtgtcaaccgtattgatgagctgctcgaggctgtcgacacctggatccccacccctcagcgtgataccgacaagcccttcctcatggctgttgaggacgtcttctccattgctggccgtggtaccgtcgtttctggccgtgtcgagcgaggtgtcttgaagcgcgatgccgaagtcgagctggttggcaagggcactgcgcccatcaagaccaaggttaccgacattgaaaccttcaagaagtcgtgtgaagagtctcgcgccggtgacaactcgggtctcctcctccgtggtgtcaagcgtgacgacgtccgccgtggcatggtcgtttctgttcctggacaagtcaaggcccacaagaagttcctcgtctccatgtatgtgttgagcaaagaggaaggtggccgccacacgggcttcggcgagaactacaggccacaaatgttcatccgtactgctgacgagtcatgcgcgctgcactggccagaaggtaccccagatgctcacgacaagcttgttatgcctggtgataacgttgagatggtttgtgagcttcacgtgccaca

SEQ ID NO: 2197 - DNA, 799 bp, Fusarium moniliforme
  strain WSA-213
acccgtgaacacttgctcctcgctcgtcaggttggtgttcagcgaattgtcgtctttgtcaacaaggtcgatgccattgatgaccccgagatgcttgagctcgtcgagatggagatgcgcgagcttcttaacacctatggcttcgaaggcgacgacactcccgtcatcatgggctcggctctcatgtctctccagaaccagcgccctgagattggcaccgagaagattgatgagcttcttgctgccgtcgacgagtggatcccaacccccgagcgtgaccttgacaagcccttccttatgtccgtcgaggatgtcttctccattgctggccgtggtaccgtcgtgtctggccgtgtggagcgtggtgttctgaagcgtgaccaggagatcgagcttgttggaaagggtcaggaggttatcaagaccaaggttaccgacatcgagaccttcaagaagtcttgtgagcagtcccaggctggtgacaactctggtctcctcatccgaggtgttcgccgtgaggatgtccgccgtggtatggtcgtctgcgctcctggcaccgtgaagtctcacacccagttcctcgcttccctctatgtcctctccaaggaggagggtggccgacacaccggtttccaggagcactaccgaccccagctctacctccgaaccgcagatgagtccattgacctgactttccctgagggtactgaggatgcctccagcaagatggtcatgcctggcgacaacaccgagatggttgtcaccatgggtcaccccaatgccatcgaggttggtcagc

SEQ ID NO: 2198 - DNA, 819 bp, Fusarium solani
  ref <308>: DATABASE ACCESSION NUMBER: ATCC 32793
ctctgacggtcagatgccccagacccgtgagcacttgctgcttgcccgtcaggtcggtgtccagaagattgtcgtcttcgtcaacaaggtcgatgccattgacgaccctgagatgcttgagctcgtcgagatggagatgcgtgagctcctcaacacctacggcttcgagggtgacgagacccctgtcatcatgggctctgctctcatgtccctccagaaccagcgccccgagatcggtagccagaagattgacgagctccttgccgccgttgacgagtggatccctacccccgagcgtgaccttgacaagcccttcctcatgtccgttgaggatgtcttctccattgccggccgtggtaccgtcgtctctggccgtgtcgagcgtggtgtcctgaagcgcgaccaggagattgagctcgtcggcaagggtaacgaggtcatcaagaccaaggtcaccgacattgagaccttcaagaagtcttgcgagcagtcccaggctggtgacaactctggtctcctcatccgaggtgtccgccgtgaggatgtccgccgtggtatggtcgtctgcgcccccggcactgtcaagtcccacactcagttcctttcttccctctacgtcctcaccaaggaggagggtggccgacacactggcttccaggagcactaccgaccccagctctacctccgaactgctgatgagtccatcgacctgaccttccccgagggtaccgaggacgccagcagcaagatggtcatgcccggtgacaacaccgagatggtcatcaccatgggccaccccaacgccattgaggtcggtca

SEQ ID NO: 2199 - DNA, 1025 bp, Histoplasma capsulatum
  strain WSA-377
tgctgacggccaaatgtaagacgccgcgagggagtgctgaaggttttatgctttttaggccctttgtttctgagagcatgatgatactaatactcggaaacgtatctattaggcctcaaacacgtgagcatttgctccttgcccgacaggtcggtgtccaaaagatcgtcgttttcgtgaacaaagtcgacgcccttgaggacaaggagatgttggagcttgtcgagttagaaatgagagagctcttaaacacctacggatttgagggtgaagagacacccatcatctttggttctgccctttgcgccatggaaggccgtgagcctgagttgggagaaaagaaaattgatgaattgctggaggctgttgatacttggatcccaacaccacaacgtgataccgaaaaacctttcttgatgtccgttgaggaagtattctctatctccggtcgtggaaccgttgcctccggtcgtgttgagcgcggtgtcctcaagaaggattcagaagtcgagctaattgggggcggctccacccccatcaggacgaaggtaactgatatcgaaactttcaagaaatcctgtgacgagtctagagctggggacaactccggtcttttattgcgtggtatcaagcgtgaagatatccgccgtggtatggtagttgccgttcctggcagcgtcaaggcccacgacaagttcttggtgtcgatgtatgtcctgaccgaagctgagggtggtcgccgaaccggattcggccagaactatcgtcctcaaatgttcatccgcacagctggtatgtcaaaatggggccccttttcataatcctttctttttttccttttcctctctctatctctctctctgtttcttttcaactcgcctgattcacgaaattaactaacccctttgattatagacgaagccgcccatctcagcttccctagtggagcagatgaaagcaaactcgttatgcctggtgacaacgtcgagatgatcctccagacacaccgccccgtggctgctgag

SEQ ID NO: 2200 - DNA, 667 bp, Kocuria kristinae
  ref <308>: DATABASE ACCESSION NUMBER: ATCC 27570
agcacgtgctgctcgcccgccaggtcggcgtgccgaccctgctggtcgccctgaacaaggccgacatggtcgaggacgaggagctgctggacctcgtcgagatggaggtccgcgagctgctgtcctcccaggagttcgacggcgacaacgcccccgtcatccgcgtctccgcgctgaaggcgctggagggcgacgagaagtgggtcaagtccatcgaggagctcatggaggccgtggacgagtacatcccggaccccgtgcgcgacaaggacaagccgttcctgatgcccatcgaggacgtcttcaccatcaccgggcgcggcaccgtggtgaccggtcgcgccgagcgcgggaccctggccctgaactccgaggtcgagatcgtcggcatccgcccgatccagaagaccacggtcaccgggatcgagatgttccacaagcagctcgacgaggcctgggccggcgagaactgcggtctgctgctgcgcggcctgaagcgcgacgacgtcgagcgcggccaggtcgtggtgaagccgggttccatcaccccgcacaccaacttcgaggcgaacgtctacatcctgtccaaggacgagggtgggcgtcacaacccgttctactcgaactaccgtccgcagttctacttccggaccaccgacgtcaccgg

SEQ ID NO: 2201 - DNA, 778 bp, Vibrio mimicus
  ref <308>: DATABASE ACCESSION NUMBER: ATCC 33653
tgctgcaacagatggtccaatgccacaaactcgtgagcacatcctgctgggtcgccaagtaggtattccttacatcatcgtattcatgaacaaatgtgacatggttgacgatgaagagcttctagagctggttgagatggaagttcgtgagcttctgtctgagtacgatttcccaggtgatgacctgccagtaatccaaggttcagcactaggcgcgctaaacggcgaagcacagtgggaagcgaagattgttgaactagcagaagcactagattcatacattccagagccagagcgtgcagtagacatggcattcctgatgccaatcgaagacgtattctcaatccaaggtcgtggtacagtagtaactggccgtatcgagcgcggcatcctgaaagtgggtgacgaagttgcgatcgttggtatcaaagacacagtaaaaactacctgtacaggtgtagaaatgttccgtaagctgcttgacgaaggtcgtgcaggtgagaacgttggtgcactgctacgtggtactaagcgtgaagaagtagagcgtggtcaagtactggcgaagccaggttcaatcaccccacacactaagttcgaatcagaagtatacgtactgtcaaaagacgaaggtggccgtcatactccattcttcaaaggttaccgtccacagttctacttccgtacaactgacgtaacaggcagcatcgagcttccagaaggcgtagaaatggtaatgccaggcgacaacatcaagatggttgtagacctgattgca

SEQ ID NO: 2202 - DNA, 412 bp, Citrobacter freundii
  ref <308>: DATABASE ACCESSION NUMBER: ATCC 8090
aacgctgaccctgcaggttattgccgctgcgcagcgtgaaggtaaaacctgtgcatttatcgatgcagaacacgcactggacccggtctatgcccgtaagcttggcgttgatatcgataacctgctgtgttctcagccggataccggtgaacaagcgctggaaatctgtgatgcactggcgcgctccggtgcggttgacgttatcgttgtcgactccgttgccgcattgacgccgaaggcagaaatcgaaggcgagattggcgactctcacatgggccttgcggcgcgtatgatgagccaggcgatgcgtaagctggccggtaacctgaagcagtccaacacgctgctgattttcatcaaccagatccgtatgaagattggcgttatgttcggtaacccggaaaccaccacc

SEQ ID NO: 2203 - DNA, 337 bp, Clostridium botulinum
  strain 20:1.2
tttagatccatcttatgctagaaatttaggtgttgatatagataacctaatagtttctcaaccagatacaggagaacaggctttagagataacagaagctttagtaagatcaggagcagtagatgttatagttgtagactctgtagcagctttagttcctagggcagaaatagaaggagaaatgggagactcacatgtaggtcttcaagcaagacttatgtctcaagccctaagaaaattagcaggatctataaataaatctaagtgtgtagctatatttataaaccaattaagagaaaaggttggtataatgtttggaaatccagaaacaactcct

SEQ ID NO: 2204 - DNA, 379 bp, Francisella tularensis
  ref <308>: DATABASE ACCESSION NUMBER: ATCC 29684
aaagcaaggcggtactgcagcatttgttgatgctgagcatgcactagatccaaaatatgcaaagcttttaggtgttgatgttgataatctgatcgtgtcacagccggatacgggtgagcaagctttagagattgctgatatgttggtacgttctggaggagttgatattgtagtaattgactctgttgctgcacttacgccaaaggcagagattgagggtgacatgggcgactcgcacatgggcttacaagcaagattaatgtcacaagcactaagaaaactaacggcaaatatcaagcgctcaaatactctagtgatattcattaaccaaattcgtatgaagatcggggttatgtttggtaaccctgaaactacaact

SEQ ID NO: 2205 - DNA, 337 bp, Peptostreptococcus anaerobius
  ref <308>: DATABASE ACCESSION NUMBER: ATCC 27337
acttgacccagtatatgcaagggctcttggagtggatatagacaacctagtcatatctcagccagatacaggagaacaggccctagatatagcagagtcccttataagatcaggagctgtagatatactagtaatagactcagtagctgccctagtacctaaggcagaaatagaaggtgacatgggagattctcacgtaggtctacaggctagacttatgtcacaggcacttagaaaattgactggatctataaagaagtcaaactgtgttgttatatttatcaaccagttgagagaaaaagtaggggttatgttcggtaatccagagacaacaaca

SEQ ID NO: 2206 - DNA, 337 bp, Peptostreptococcus asaccharolyticus
  strain LSPQ 2639
tcttgatgctggatatgcaaaaaaccttggagtagatgtagaaaatttaattatttctcaacctgatacaggtgagcaagccttagaaataactgaagctcttgtaagatctaacgctgttgatttaattattatagactcagttgccgcacttgtaccaaaagcagaaatcgatggtgacatgggagctgcacaaataggtcttcaagcaagacttatgtctcaagctcttagaaaattaactggggcaatcaacaagtcaaaatgtaccgttgtatttattaaccaacttagagaaaaagttggtatcatgtttggtaacccagaaactacaaca

SEQ ID NO: 2207 - DNA, 408 bp, Providencia stuartii
  ref <308>: DATABASE ACCESSION NUMBER: ATCC 33672
ctcacgttgcaagttattgcagcagcacaacgtagcggaaaaacctgtgcatttatcgacgctgaacatgcgctagatccaatctatgcgaaaaaactgggtgttgatatcgataaccttctatgttctcaacctgatactggtgagcaagcattagagatttgtgatgcactgacgcgttcaggcgctgttgatgtcattatcgttgactccgtggccgcattaacaccaaaagctgaaattgaaggtgaaatcggtgactcacacatgggcttagcggctcgtatgatgagccaagcgatgcgtaaattagcgggtaacttaaagaactcgaatacacttttaatcttcattaaccaaatccgtatgaagattggcgttatgtttggtaacccagaaaccactaca

SEQ ID NO: 2208 - DNA, 403 bp, Salmonella choleraesuis subsp. choleraesuis
  ref <308>: DATABASE ACCESSION NUMBER: ATCC 9150
gctgcaggtgattgccgctgcgcagcgtgaaggtaaaacctgtgcgtttatcgatgcggaacacgcgcttgaccctgtttacgcacgcaagctgggcgtcgatatcgataacctgctttgttctcagccggataccggcgagcaggcgctggaaatctgtgacgcgctggcgcgttcaggcgcggtggacgtcattgtggtcgactccgtagcggcgctaacgccgaaagcggaaatcgaaggcgaaattggcgactctcacatgggcctcgcggcgcgtatgatgagccaggcgatgcgtaagctggcggggaacctaaaacagtccaacacgctgttgattttcatcaaccagatccgtatgaagattggcgtgatgttcggtaacccggaaaccaccacc

SEQ ID NO: 2209 - DNA, 412 bp, Salmonella choleraesuis subsp. choleraesuis
  ref <308>: DATABASE ACCESSION NUMBER: ATCC 14028
gaccctgacgctgcaggtgattgccgctgcgcagcgtgaaggtaaaacctgtgcgtttatcgatgcggaacacgcgcttgaccctgtttacgcacgcaagctgggcgtcgatatcgataacctgctctgctctcagccggataccggcgagcaggcgctggaaatctgtgacgcgctggcgcgttcaggcgcggtggacgtcattgtggtcgactccgtagcggcgctaacgccgaaagcggaaatcgaaggcgaaatcggcgactctcacatgggcctcgcggcgcgtatgatgagccaggcgatgcgtaagctggcggggaacctgaaacagtccaacacgctgttgattttcatcaaccagatccgtatgaagattggcgtgatgttcggtaacccggaaaccaccacc

SEQ ID NO: 2210 - DNA, 337 bp, Staphylococcus saprophyticus
  ref <308>: DATABASE ACCESSION NUMBER: ATCC 15305
attagatcctgtttacgcagaagctttaggcgtagatatacaaaatttatatttatctcaacctgatcatggggaacaaggtttagaaattgccgaagcatttgttagaagtggcgctgttgatatcgttgtggtcgattcagttgctgcgcttacacctaaagctgaaattgaaggtgaaatgggagatacgcacgttggtttgcaagcacgtcttatgtcccaagccttgagaaagctttccggtgcaatttcaaaatcaaatacaacagcagtatttatcaaccaaatccgtgaaaaagttggtgtgatgttcggtaatcctgaagttacacca

SEQ ID NO: 2211 - DNA, 412 bp, Yersinia pseudotuberculosis
  ref <308>: DATABASE ACCESSION NUMBER: ATCC 29833
gacactgacattacaggttatcgccgccgcacagcgtgaaggcaaaacgtgtgcatttatcgatgccgaacatgcccttgacccaatctatgccaagaaattgggtgtagatattgataacctactgtgttctcagccagatactggcgagcaggcactggaaatttgtgatgcgctgactcgctctggtgcggttgacgttatcatcgttgactccgtagcggcattgacaccaaaagctgaaattgaaggtgaaattggcgattctcatatgggccttgccgcgcgtatgatgagccaggctatgcgtaagctggcgggtaacctgaagaatgcgaataccttactgatttttatcaaccaaatccgcatgaaaattggcgtgatgtttggtaacccagaaaccactacc

SEQ ID NO: 2212 - DNA, 404 bp, Zoogloae ramigera
  ref <308>: DATABASE ACCESSION NUMBER: ATCC 25935
cacgctcaccttgcaaaccatcgcggaaatgcaaaaactgggcggcacctgcgcgtttatcgacgccgagcacgcactggacgtcacgtacgcgcaaaagctgggcgtcaacctgagcgatctgctgatctcgcaaccggacaccggcgaacaagcgctggaaatctgcgacgccctggtgcgttccggttcggtggacatggtcgtgatcgactcggtcgccgcgctgaccccgcgcgccgagatcgaaggcgacatgggcgattcgctgccaggtttgcaggcacgtttgatgtcgcaagcactgcgcaagcttaccggttcgatcaaccgcaccaacaccctggtcatcttcatcaaccagatccgcatgaaaatcggcgtcatgttcggcagcccggaaa

SEQ ID NO: 2213 - DNA, 42 bp, Artificial Sequence
  Synthetic DNA Sequence
cgtgccattgacatgatttccgaagaagacgctgaaggcacg

SEQ ID NO: 2214 - DNA, 125 bp, Abiotrophia adiacens
  ref <308>: DATABASE ACCESSION NUMBER: ATCC 49175
caactacattacgttctgcaacacaaggtcgtggtactttcagtatgacatttgaccactatgaagatgttcctaagagcattgcagaagaaatcatcaagaaaaatggcggtaacggagaataa

SEQ ID NO: 2215 - DNA, 140 bp, Acinetobacter baumannii ATCC 19606
cgactcaaatgcgttctatgtctcaaggtcgtgcgacatactcaatggaatttgctaaatatgctgaaactccacgtaacgtggctgaaggcatcatcgctaaattccaagctggcggtaaaaaaggtgacgacgagtaa

SEQ ID NO: 2216 - DNA, 119 bp, Actinomyces meyeri
  ref <308>: DATABASE ACCESSION NUMBER: ATCC 35568
ccggtgacctgcgttctaagacgcagggtcgcgctgtctactccatggagttcgacagctacgccgaggttccgcgcgcggtcgcggatgagatcgtcggcaagtctcggggcaactga

SEQ ID NO: 2217 - DNA, 113 bp, Clostridium difficile
  ref <308>: DATABASE ACCESSION NUMBER: ATCC 9689
cgaccgacgttcgctccatgtcccagggtcgcgcaagctactctatggaattcaaaaaatacaacacagctccggcgcacatcgctgaaactgtatccaaaaaacaaggctga

SEQ ID NO: 2218 - DNA, 119 bp, Corynebacterium diphtheriae
  ref <308>: DATABASE ACCESSION NUMBER: ATCC 27010
gcgacctgcgttcccgtacccagggccgtgcaaactacaccatgatcttcgactcctacgctgaggttcctaccaacgtggcagctgagatcgtggcagagcgcaacggcactgcctaa

SEQ ID NO: 2219 - DNA, 115 bp, Enterobacter cloacae
  ref <308>: DATABASE ACCESSION NUMBER: ATCC 13047
aactcagctgcgttctctgaccaaaggtcgtgcatcatacaccatggaattcctgaagtatgatgatgcgcctaacaacgttgctcaggccgttattgaagcccgtggtaagtaa

SEQ ID NO: 2220 - DNA, 115 bp, Klebsiella pneumoniae subsp. pneumoniae
  ref <308>: DATABASE ACCESSION NUMBER: ATCC 13883
aactcagctgcgttctctgaccaaaggtcgtgcatcatacaccatggaattcctgaagtatgatgatgcgccgaacaacgttgctcaggccgttattgaagcccgtggtaaataa

SEQ ID NO: 2221 - DNA, 113 bp, Listeria monocytogenes
  ref <308>: DATABASE ACCESSION NUMBER: ATCC 15313
caactcaccttcgttcaggtacgcaaggtcgtggtgtatacactatgcaatttgaccactatgaagaagttcctaaatctattgctgaagaaatcattaaagctaatggtgga

SEQ ID NO: 2222 - DNA, 118 bp, Mycobacterium avium
  ref <308>: DATABASE ACCESSION NUMBER: ATCC 25291
cggcgacctgcggtccaagacccaaggccgggcgaactactccatggtcttcgactcctacgccgaagtgccggccaacgtgtcgaaggagatcatcgcgaaggcgacgggtcagtga

SEQ ID NO: 2223 - DNA, 119 bp, Mycobacterium gordonae
  strain M-Gor-1
ccggcgacctgcggtccaagacgcaaggccgggcgaactactccatggtgttcgactcgtacgccgaagttccggcgaacgtgtcgaaggagatcatcgcgaaggcgacgggcgaatag

SEQ ID NO: 2224 - DNA, 118 bp, Mycobacterium kansasii
  strain Mkan-1
cggcgacctgcggtccaagactcaaggccgggcgaactactcgatggtgttcgattcctacgccgaagtgccggctcaggtgtcgaaggagatcatcgcgaaggcgactggcgagtga

SEQ ID NO: 2225 - DNA, 118 bp, Mycobacterium terrae
  strain Mter-1
cggagacttgcggtcgaagacccagggccgggcgaactactccatggtgttcgactcctacgccgaagtgccggcgcaggtggcgaaggagattatcgcgaaggcaacgggcgagtaa

SEQ ID NO: 2226 - DNA, 115 bp, Neisseria polysaccharea
  ref <308>: DATABASE ACCESSION NUMBER: ATCC 43768
gaccgacctgcgttctgcaacccaaggccgcgctacttactctatggagttcaagaaatattctgaagctcctgcccacatagctgctgctgtaactgaagcccgtaaaggctaa

SEQ ID NO: 2227 - DNA, 118 bp, Staphylococcus epidermidis
  ref <308>: DATABASE ACCESSION NUMBER: ATCC 14990
aacttcattacgttctaacacgcaaggtcgcggtacttacacaatgtactttgaccactatgcagaagttcctaaatcaattgctgaagaaatcatcaagaaaaataaaggtgaataa

SEQ ID NO: 2228 - DNA, 118 bp, Staphylococcus haemolyticus
  ref <308>: DATABASE ACCESSION NUMBER: ATCC 29970
aacttcattacgttctaacactcaaggtcgcggtacttacactatgtacttcgatcactatgcagaagttccaaaatcaattgctgatgatatcatcaaaaaaaataaaggtgaataa

SEQ ID NO: 2229 - DNA, 1630 bp, Succinivibrio dextrinosolvens
  ref <308>: DATABASE ACCESSION NUMBER: ATCC 19716
cgttcaatgcgtgttctagacggtgcagttatggtttactgtgctgtgggtggtgttcagcctcagtctgaaaccgtttggagacaggctcagaagtacaaggttcctcgtattgctttcgttaataagatggaccgtactggtgctaatttcctacgtgttgtagagcagattaagacccgtctaaagggtaaccctgttcctctaatgttacctatcggtaaagaggacagctttgttggtgtagttgacctaatcaagcgtaaggctatcgactgggatgaggcatctcagggtatgaagtttgagtacgttgacattccagcagatatggttgaggaagttgaagagtggcgtgcaaagcttgtagaagcagctgcagaagctaacgacgagctgatggataaattcttcggtggtgaagagctgaccgaggaagagatcaaggctgctctacgtgagcgtactcttcgcaacgaaattattcctatgtgctgcggttcagcatttaagaacaagggtgttcaggcaatgcttgacgctgttgttgagtatcttccatctccagcagatgttcctgctgttgagggtaagaccctaaccggtgaagctgatactcgtaaggctgacgataaagagccattctctgctttagcatttaagctagcaaatgacccattcgtaggtaacttaacattcttacgttgctactcaggctttattaagtctggtgacactgtaatgaactcagataagcagaagcgtgagcgtttcggccgtctagttcagatgcacgctaatgctcgtaatgaggttagcgaggtttatgcaggtgacatcgttgctgctattggtctgaaggaaaccgttaccggtgataccttatgtgacccagagcatccaatcattcttgagtcaatcgactttgcagagccagttatctctgtagcagttgagcctaagaccaaggacgatcaggagaagatggctcttgctttacagcgtttagcaaaagaagatccttcattccgcgttcgtacagacgaagagtctggccagaccattatttctggtatgggtgagcttcacctagacatcattgttgaccgtctacgccgtgagttcaaggttgagtgtaatcagggtaagccacaggttgcataccgtgagaccattaagagcaaggttgaacagcaaggtaagtttgctcgtcagtctggtggtcgtggtcagtacggtgactgctggttacgtatggaacctcttgagccaggtaagggctacgaattcgtgaatgagattgttggtggtgtaattcctaaggaatatatccctgcaattgataagggctgtcaggagcagatcgctaacggtgttctagctggtttcccagttgttgacatcaagatcactgtattcgatggttcttaccacgaagttgactcttcagaaatggcattcaagattgctgcttctatggcattcaaagagggcttcaagaaggcaaatcctgttcttctagagcctttaatgaaggtagaagttgatactcctgaagactacatgggtgacgttattggtgacttaaaccgtcgtcgtgctatcgttgaaggcatggaagatggtccta

SEQ ID NO: 2230 - DNA, 1662 bp, Tetragenococcus halophilus
  ref <308>: DATABASE ACCESSION NUMBER: ATCC 33315
ttgaagtgcaacgttcattgcgtgtgctagacggttcagttactgtcttggactcacaatcaggtgttgaaccacaaactgaaacagtttggcgtcaagcaacagaatatcaagtacctcgtattgtattctgtaataaaatggataaggttggcgcagatttcttatattctgtccgatcattgcatgatcgtttagaagctaatgcacaacctatccaattgccaattggtgctgaagataactttgaaggtatcatcgaccttgtgaagatgaaagctgaattttataaagatgatttagggactactttcgaagaaactgaaatcccagatgaatataaagaaacagctcaagaatggcataataatttggtagaatctgtagctgattttgatgaagatatcatgatgaaatacttggaaggtgaagaaattacacctgaagagttacaagcaggtattcgtaaagcaacattatctgttgaattttacccagtattatgtggttctgcatttaaaaacaaaggtgttcaaatgatgttggatgcagtaattgattacttgccttctccaaccgacgttcccccaattaaagggatcgatccgaaaacagatgaagaaactgaacatcctgctgatgatagtgagcctttttcatcacttgcttttaaagttatgtcagacccttatgttggccgcttaactttcttccgtgtttattcaggtgtgttggatacaggttcttatgtattgaatgctactaagggttcacgtgaacgaattggtcgtattttgcaaatgcatgccaattctcgttctgagatcgataaggtttattcaggtgacattgcagctgctgtaggcttgaagaacactacaacaggggataccctttgtgatgagaaaaatccagttattttggaaactatcaacttccctgaaccagtaattcaagttgctgttgaacctaagtcaaaagctgaccaagataaaatgagcgtagcactacaaaaacttgcagaagaagacccatcttttaaagtggaaaccaacgctgaaactggcgaaactgtaattgctggtatgggtgaacttcaattagacgttcttattgaccgtatgaagactgaatttaaagtggatgccaatattggtgcaccacaagtttcttatcgtgaaactttccgttcatcaactaaagctgaagggaaatttatccgccaatctggtggtagaggtcaatacggtcacgtatgggttgaatttactccaaacgaagaaggagcaggattcgaatttaaaaactccattgttggtggggttgtccctcgtgactatatacctgcagtacaaaaaggactggaagacgccatggaaaatggtgtgttagctggttatccattagttgacgtaaaggcagaactgtttgatggttcttaccatgacgtcgactctaatgaaacagccttccgtattgcggcttcaatgtctctacgtgaagctgcgaaaaaggcagatccagttattcttgaaccgatgatgaaagtaacaattagtatccctgaagaatatctaggtgatattatgggacatgttacagctcgtcgtggtcgtgttgaaggaatggatgctcacggtaatgcacaaactgtaaatgcgt

SEQ ID NO: 2231 - DNA, 1652 bp, Veillonella parvula
  ref <308>: DATABASE ACCESSION NUMBER: ATCC 10790
aagtagaacgttctctacgtgtacttgacggttctgttgcggtgttcagtgctaaaggtggcgttgaacctcaatccgaaacagtatggcgtcaggcttctaactacggcgtacctcgtatcgcttatgtaaataagatggatactgtaggtgctgacttcttcaacgtagttgacatgatgaaagctcgtttgggtgcaaattccgtagctatccaagtaccaatcggtgctgaagatactttcgaaggcatcattgacttgatgactatgaaagcggaaatttataaatccgatgacggtaaagaatatgaaatcactgatatccctgctgaatatcaagaagtagcagaagctcgtcgcgaaatgatgatcgatgctatcgctgaaacagatgatgatatcatgatgaaatatttggaaggcgaagaaatttctgtggaagaattgaaagcggcattgcgtaaagctgttattgctaaccaattattcccagttctttgtggttcttcctataaaaataaaggtgttcaaatgttattggatgctgttatcgattacatgccagctccaatcgacatcccacctattaaaggtgttgttcctggtactgaagaagaaacaactcgtccttcttccgatgaagagccattctctgcattggcattcaaaatcatggctgacccttatgttggtaaattagcgttcttccgtgtgtactccggtacattggaatctggctcctacgttttcaactccactaaaggtaaaaaagaacgtatcggtcgtattcttcaaatgcacgctaactcccgtaaagaaatcgaacgcgtatattctggtgacatcgctgcggcggttggcttaaaggatactactacaggcgacacattgtgtgatgaaaaatctcctgtaatccttgagtccatggaattccctgaaccagttatctccgttgctgttgaacctaaaacaaaagctgaccaagaaaaaatgggtacagctcttgctcgtttggcagaagaagatcctactttcaaagttcgtactgatgaagaaacaggtcaaactattatctctggtatgggcgaacttcacttggatatcatcgttgaccgtatgaaccgtgaattcaaagtagattgtaacgtaggtaaacctcaagtagcataccgcgaaactatccgtaaagctgttaaggctgaaggtaaattcgtacgtcaatctggtggtcgtggtcaatatggtcactgctggttggaattgattcctcaagaaccaggtgctggcttcgagtttgaaaacaaggttgtaggtggtgcgattcctcgtgaatacatcggacctgttgaaagcggtgttaaagaagctatggaatccggtgttatcgctgggtaccctatggttgatgttaaagttatcgtatttgatggttcttaccatgacgttgactccaacgaaatggccttcaaaattgctggttctatgggcttcaaagaaggtgctcgcaaagcagaccctgcattgcttgaaccatatatggctgtagaagtagacgttcctgaagaatacatgggcgacgttatcggtgacttgaactctcgtcgtggtcgcatggacggcatggaagctcgtaatggttcccaacatatc

SEQ ID NO: 2232 - DNA, 1624 bp, Yersinia pseudotuberculosis
  ref <308>: DATABASE ACCESSION NUMBER: ATCC 29833
agtagagcgttccatgcgtgttcttgacggcgcggtaatggtttactgtgcagttggtggtgttcagccacagtctgaaaccgtatggcgtcaggctaataaatataaagttccacgtattgcgttcgttaacaaaatggaccgtatgggtgcgaacttcctgcgcgtagttggtcaactgaaatctcgccttggtgcgaacccagttccactgcagttggcaattggcgcagaagaaaaattcaccggtattatcgatctggtgaaaatgaaagcgatcaactggaacgaagctgatcagggcgtgaccttcgaatatgaagaaatccctgctgatatggctgaactggctgctgaatggcaccagaatctggttgaatctgcggcagaagcgtctgacgagctgatggacaaatacttgggtggcgaagagctgaccgaagaagaaatcaagaaagctttacgtcaacgtgttctgaaaagcgaaattattcttgttacctgtggttctgcgtttaaaaacaaaggcgtacaggcaatgctggatgcggttattgagtacctgcctgcaccaactgacgttgaatcaatcaacggcatcttggatgatggcaaagatactccggctgttcgtcattctgacgacaaagagccgttctctgctctggcgttcaaaatcgctaccgacccattcgtgggtaacctgacgttcttccgcgtgtactctggtattgttaattccggtgataccgttctgaactcagtgaaatcgcaacgtgaacgcttaggtcgtatcgtacagatgcacgctaacaagcgtgaagagatcaaagaagttcacgccggtgatatcgcagccgctatcggtctgaaagatgtgactacgggtgacactttgtgtgacccgaataatccgatcatcttggaacgtatggagttcccagagccggtaatctctgttgctgttgaaccaaaaaccaaagctgaccaagaaaaaatgggtatggctctggggcgtttggcgaaagaagatccatcattccgcgtttggactgacgaagaatctggtcagactatcatcgctggtatgggtgagttgcatttggatatcctggttgaccgtatgcgccgcgaatttaacgtggaagcaaacgtcggtaaacctcaggttgcgtaccgtgaaactatccgcgaaaccgttaaggatgtggaaggtaagcacgctaagcagtcaggcggtcgtggtcagtatggtcatgttgttatcgacatgtctccattgccaccgggtggtgttgggtatgaattcgtcaacgaaatcgttggtggttctattcctaaagaattcattccggccgttgataaaggtattcaagaacagctgaaatctggccctctggcaggttacccagttgttgacgttaaagtgcgtctgcactacggttcttaccatgacgttgactcctcagaattggcatttaaattagctggttctatcgcctttaaagaaggtttcaaacgagctaaaccagttctgcttgagccaatcatgaaggttgaagtcgaaacccctgaagattacatgggtgacgtaatgggcgacctgaaccgtcgtcgcggtatc

SEQ ID NO: 2233 - DNA, 1636 bp, Zoogloae ramigera
  ref <308>: DATABASE ACCESSION NUMBER: ATCC 25935
gaacgctcgatgcgcgtgcttgacggtgcttgcatggtttactgcgcagtgggcggtgttcagccacagtcggaaaccgtgtggcgtcaggctaacaagtacaaagtgccacgtctggccttcgtcaacaagatggaccgtaccggcgccaacttcttcaaggtgtacgagcagatgcgtgctcgcctgaaggccaacccggtcctgatccagatccctatcggcgctgaagacaacttcaaaggcgtgatcgatctggtcaagatgaaggctatcctgtgggacgaagcgtcgcaaggcatgaaattcgactacgtcgatattcctgcagagctggctgattcggccgccgagtggcgcgaaaagatggttgaagctgctgctgaagccaccgaagagctgatgaacaagtacctggaagaaggcgacctgaccgaagccgagatcaagcaggcgctgcgtacccgtaccatcgcttcggaaatcgttccgatgatgtgcggtaccgccttcaagaacaagggcgtacaggccatgctggacgcggtcatcgaatacctgccatcgccactggacatcgacgatgtcggcggtacggacgaagacgaccagccaaccacccgtcgcgcagctgacgacgagaaattctcggcgctggccttcaagatcatgaccgacccgttcgtcggtcaattggccttcttccgcgtgtactcgggcgccgtcaattcgggcgacaccgtgtacaactcggtcaaaggtcgtaaagagcgtctgggccgtattctgcagatgcacgcgaatcagcgcgaagagatcaaagaagtgcgcgccggcgacatcgccgctgcggttggcctgaaagacgtgaccacgggcgaaaccctgtgcgatccgaccgccatcatcacgctggaaaaaatgatcttccctgagcctgtgattcaacaggcagtcgagccaaaaaccaaggccgaccaggaaaaaatgggcctggcactgaaccgcctggcacaggaagatccttcgttccgcgtgaagaccgatgaagaatcgggccagaccatcatcggtggwatgggcgagctgcacctggaaattatcgttgaccgcatgaagcgcgaattcggcgtggaagcaaccgtcggcaagccacaagtggcttaccgcgaaacgatccgtaaaacctgcgaagaatcggaaggcaagttcgtcaagcaatccggtggtcgtggtcaatacggtcacgttgtgctgaagatcgagccgcaagaaccaggcaagggcttcgagttcgttgacgccatcaagggcggtaccgttcctcgcgagtacatccctgcggtggaaaaaggcgtgcgcggcaccctgaacaccggcgtgctggctggttacccggtcgtggacgtcaaggtcacgctgttcttcggttcgtaccacgatgtggactcgaacgaaaacgcgttccagatggccgcttcgatggcattcaaagaaggctgccgcaaagcatcgccagtcattctggagccaatgatggctgtggaagtggaaacgccggaagactacgccggtaccgtgatgggcgacctgtcgtcccgccgcggtatggtgcagggcatggacgaaatcccag

SEQ ID NO: 2234 - DNA, 1656 bp, Aeromonas hydrophila
  ref <308>: DATABASE ACCESSION NUMBER: ATCC 7966
ggcacgaacgatcttgccggacgggccatcttccataccttcgatcaggccacgacgacggttcaggtcaccgatcacgtcgcccatatagtcttccggagtctcgacttctactttcatgatcggttcgagcagaaccgggttggccttcatgaagccagccttaaaggccatggaagcagcgatcttgaacgccagttcggaagagtcgacatcgtggtaggaaccgaagtgcagacgcacgcccagatccataaccggataacctgccagcgggccggacttcagttgctcgcggatacccttgtcaacacccgggatgaactcaccaggaatgacgccgcccttgatgtcgttgacgaattcgtaggctttgccttcttccagcgggtacatgtcgatcacaacgtgaccgtactgaccacgaccaccggactgcttggcgtgcttaccttcgatatccttgacggtgttacgaatggtttcacggtaggcaacctgcggcttacctacgttcgcttctaccttgaactcgcgacgcatacggtcaacgatgatgtccaggtgcagctcacccataccggcgatgatggtttggccagactcttcgtcagtccatacgcggaaggacgggtcttcctgagccagacggcccagagccaggcccatcttctcttggtcagccttggttttcggctcaactgcgatggagattaccggttccgggaattccatacgctcgaggatgatcggcgctttttcgtcacacagggtgtcaccggtggtcacgtctttcagaccaatggcggcagcgatgtcgcctgcgcgaacttctttgatctcttcacgcttgttggcgtgcatctgaacgatacggccaaaacgctcgcgcttctctttaacggagttcagcacggagtcaccggagttaaccacaccggagtaaacgcggaagaaggtcaggttgcctacgaacgggtcggtagcaatcttgaatgccagagcagcaaacggctcgtcatcagaagcatgacgctcgtctttggtctcgccatccagcttcagaccgtcgatggctgctacgtcggtcggcgccggcagatagtcaaccacggcatccagcatggcctgtacgcccttgttcttgaacgcggagccacaggtaaccaggatgatttcgttgttcagaacacgctgacgaagagctttcttgatctcttcctcggtcagttcttcaccacccaggtatttttccatcaggtcttcagacgcttcagcagcggcttcaaccagggtcatgcgcatttcttgcgctttttccagcagctcagccgggacgtcttcgtaatcgaaggatacgccctggtcagcttcgctccagttgatggctttcatcttgaccaggtcgataacgcccttgaagttctcttctgaaccgatgttcagttgcagcggaaccgggttacctttcagacgggtcttgatgtgctcaacgcagcgcaggaagttggcaccggtacggtccatcttgttgacgaacgcgatacggggaaccttgtacttgttagcctgacgccatacggtttcagactgtggctgtacgccachtacggcacagtacaccatcacggcgccgtccagaacacgcatggaacg

SEQ ID NO: 2235 - DNA, 155 bp, Abiotrophia adiacens
  ref <308>: DATABASE ACCESSION NUMBER: ATCC 49175
tctcctccccatttgataactaccaaatgaacgctatcgactggttatgtcagtcataaccagttgatttttaagagagttctttggtataattacaatcggtagatactgttatagaatctaacaaaactcaattaataggaggaatcatttaa

SEQ ID NO: 2236 - DNA, 94 bp, Acinetobacter baumannii
  ref <308>: DATABASE ACCESSION NUMBER: ATCC 19606
tctttcgattactataagccctaactaattcttagttaaaaaccaagtgctcatggagcgaccctccatgagtagttaataaaggaagatcatc

SEQ ID NO: 2237 - DNA, 150 bp, Actinomyces meyeri
  ref <308>: DATABASE ACCESSION NUMBER: ATCC 35568
gtcccaccgggggtgagtgggggccgggcaatcggcccctgcgagccgcctcacacaccagtaatcccagtaggtctcatgccccatgggtgttaaagtgacacctagccgtaggctgagaatttctacccgagtccaggaggacgaaaa

SEQ ID NO: 2238 - DNA, 30 bp, Clostridium difficile
  ref <308>: DATABASE ACCESSION NUMBER: ATCC 9689
ttcagtcctttaggcaaggagttaattgtc

SEQ ID NO: 2239 - DNA, 317 bp, Corynebacterium diphtheriae
  ref <308>: DATABASE ACCESSION NUMBER: ATCC 27010
caactagcctctcgcttatctccctatgcaaaatttctagtcagttacagggcatagggggagcgtaggcgggggtagcggcttgctgagcacttcctctacatcaaagggaatgttgagccggccgttaccctgtacgatcccatctggtttcttcggtggtttgataaataccccgttgtgaccctaggatcatgtaactggcacaatgtaaatagctgtactgccaggctgccgaattagcagtcagaaatgtacagcactgtcaactcgtggctgcgaaatcgtagccaccacgaagtccaggaggacacaca

SEQ ID NO: 2240 - DNA, 69 bp, Enterobacter cloacae
  ref <308>: DATABASE ACCESSION NUMBER: ATCC 13047
tccacaggattaaaacctaagtcccgtgctctctcctgaggggagagcactatagtaaggaatatagcc

SEQ ID NO: 2241 - DNA, 69 bp, Klebsiella pneumoniae subsp. pneumoniae
  ref <308>: DATABASE ACCESSION NUMBER: ATCC 13883
tccacaggattaaaacctaagtcccgtgctctctccgaaggggagagcactatagtaaggaatatagcc

SEQ ID NO: 2242 - DNA, 126 bp, Listeria monocytogenes
  ref <308>: DATABASE ACCESSION NUMBER: ATCC 15313
aacaacaaagaagattaattgatttttttcgcaacatcaagtataactttagttagaagtattacttagtttaaatttaagctaagtaaaaaataattatcgaattatcgaggaggatattttaaa

SEQ ID NO: 2243 - DNA, 170 bp, Mycobacterium avium
  ref <308>: DATABASE ACCESSION NUMBER: ATCC 25291
gtgtcaactcactggctcggagccgagcaatcggctcagcgaaggcgacgggtcagtagctactggcagcggagtaatcttgccgggtcattggaatgccttgggcgcggcacaactgaaaacaccaacactgctttaacaagcaccaactagtccaggaggacacagaa

SEQ ID NO: 2244 - DNA, 103 bp, Mycobacterium gordonae
  strain M-Gor-1
ggccggcaagcctgcgagtaagctgacgcggttagcaccgcggcaaaaccaagaaaaatcaacactgcttttttaagcaccaacagtccaggaggacaacaaa

SEQ ID NO: 2245 - DNA, 101 bp, Mycobacterium kansasii
  strain Mkan-1
gccgagcgttgcgcgtaagctagctcggttaccacggcggcaaaactagaaaaacatcaacactgcttttataagcaccaacagtccaggaggacacagaa

SEQ ID NO: 2246 - DNA, 91 bp, Mycobacterium terrae
  strain Mter-1
ccagcttcccgcccgtgccgctacggtggcacaaacccaaaaagatcaatcctgctgtaacccagcaccaacaagtccaggaggacaagaa

SEQ ID NO: 2247 - DNA, 87 bp, Neisseria polysaccharea
  ref <308>: DATABASE ACCESSION NUMBER: ATCC 43768
tcaggcaaataggccgtctgaaaggctgaaatgatttttcagacggcattgttctttaatcgatctttaatgtaaaggaattagctc

SEQ ID NO: 2248 - DNA, 218 bp, Staphylococcus epidermidis
  ref <308>: DATABASE ACCESSION NUMBER: ATCC 14990
tataacttgttaagactagctatgctaggttaaaatacaggttgagcttatttataagctgacatttttatgatttgatttttaggggtaaatgcattataaaagaattataaattcttttatgctacactcaatcaattttcttctcatgatggtgagaaactatcatgagagataaatttgaaataacttttattaagaataggagagatttaata

SEQ ID NO: 2249 - DNA, 204 bp, Staphylococcus haemolyticus
  ref <308>: DATABASE ACCESSION NUMBER: ATCC 29970
ttaaacttgttttagctagaatttctaggtaaaatacagcgtaagcttattaattaagctaacatctttatgaattgattttttactgaaaatgcattataaatgaattatgaattctaacaatcattatgtctcatgatggtgagaaactatcatgagagataatattgaaataacttttactagaataggagagatttaata

SEQ ID NO: 2250 - DNA, 38 bp, Artificial Sequence
  Synthetic DNA Sequence
ccgtcggatggtgtcgtataccgcggagtcgccgacgg

SEQ ID NO: 2251 - DNA, 38 bp, Artificial Sequence
  Synthetic DNA Sequence
cggagccgttctcgctgcgttacatgctggtggctccg

SEQ ID NO: 2252 - DNA, 18 bp, Artificial Sequence
  Synthetic DNA Sequence
ccacatacagtgtctctc

SEQ ID NO: 2253 - DNA, 19 bp, Artificial Sequence
  Synthetic DNA Sequence
cattacccaaccgaaagta

SEQ ID NO: 2254 - DNA, 19 bp, Artificial Sequence
  Synthetic DNA Sequence
acctgaacagagagaaatg

SEQ ID NO: 2255 - DNA, 273 bp, Abiotrophia adiacens
  ref <308>: DATABASE ACCESSION NUMBER: ATCC 49175
atggcaaaagaaaaatttgaccgttcaaaaccacacgttaacattggtacaatcggccacgttgaccacggtaaaacaacattaactgctgctatcacaactgttttagctaagaaaggtttcgcgcaagctcaagattacggttcaatcgataaagctccagaagaacgcgaacgtggtatcacaatcaacacttctcacgttgagtacgaaacagacactcgtcactatgctcacgttgactgcccaggacacgcggactacgttaaaaac

SEQ ID NO: 2256 - DNA, 273 bp, Acinetobacter baumannii
  ref <308>: DATABASE ACCESSION NUMBER: ATCC 19606
atggctaaagccaagtttgaacgtaataaaccacacgtaaacgtgggtacaatcggtcacgttgaccatggtaaaacaactttaactgctgcgattgcaacaatttgtgcaaaaacttacggcggtgaagcgaaagattactcacaaatcgactcagcacctgaagaaaaagcacgtggtattacaattaatacatcacacgtagaatacgattctccaactcgtcactacgcacacgttgactgcccaggccacgccgactacgttaaaaac

SEQ ID NO: 2257 - DNA, 279 bp, Actinomyces meyeri
  ref <308>: DATABASE ACCESSION NUMBER: ATCC 35568
gtggcgaaggccaagtttgagcgcaccaagccgcacgtcaacatcggcacgattggtcacgttgaccacggcaagacgacgctgacggcagctatcaccaaggtgctgcatgacaagtaccccgaactgaacgagttcacccccttcgatcaggtcgacaacgctcccgaggagcgcgatcgtggcatcacgatcaacgtctctcacgttgagtaccagaccgaggcgcgtcactacgcgcacgttgacgctcccggccacgccgactacgtcaagaac

SEQ ID NO: 2258 - DNA, 273 bp, Clostridium difficile
  ref <308>: DATABASE ACCESSION NUMBER: ATCC 9689
gtggctaaagaaaaatttgatcgttccctaccgcacgtcaacgttggcactatcggtcacgttgaccatggtaaaaccactctgactgctgctctgactcgcgtttgctccgaagtattcggttccgcaatcgttgatttcgataaaatcgacagcgcaccagaagaaaaagctcgtggtatcaccatcaacaccgcgcacgttgaatacaactcgctgatccgtcactacgctcacgttgactgcccaggtcacgctgactatgtgaagaac

SEQ ID NO: 2259 - DNA, 279 bp, Corynebacterium diphtheriae
  ref <308>: DATABASE ACCESSION NUMBER: ATCC 27010
gtggcaaaggctaagttcgagcgtaccaagccgcacgtcaacatcggcaccatcggtcacgttgaccacggtaagaccaccaccaccgctgctatcaccaaggttttggcagacgcttacccagagctgaacgaagctttcgctttcgatgccatcgataaggcaccggaagagaaagagcgtggtattaccatcaacatctcccacgtggagtaccagaccgagaagcgccactacgcacacgttgacgctccaggtcacgctgactacatcaagaac

SEQ ID NO: 2260 - DNA, 273 bp, Enterobacter cloacae
  ref <308>: DATABASE ACCESSION NUMBER: ATCC 13047
gtgtctaaagaaaaatttgaacgtacaaaaccgcacgtcaacgttggtactatcggccacgttgaccatggtaaaactaccctgactgctgcaatcactaccgttctggctaaaacctacggtggttctgctcgtgcattcgaccagatcgataacgcaccagaagaaaaagctcgtggtatcaccatcaacacctctcacgttgaatatgacaccccgactcgccactacgcacacgtagactgcccaggtcacgccgactatgttaaaaac

SEQ ID NO: 2261 - DNA, 273 bp, Klebsiella pneumoniae subsp. pneumoniae
  ref <308>: DATABASE ACCESSION NUMBER: ATCC 13883
gtgtctaaagaaaaatttgaacgtacaaaaccgcacgtcaacgttggtactatcggccacgttgaccatggtaaaactaccctgactgctgccatcactaccgttctggctaaaacctacggtggttccgctcgcgcattcgaccagatcgataacgcgccggaagaaaaagctcgtggtatcaccatcaacacctctcacgttgaatatgacaccccgactcgccactacgcgcacgtagactgcccgggccacgccgactatgttaaaaac

SEQ ID NO: 2262 - DNA, 273 bp, Listeria monocytogenes
  ref <308>: DATABASE ACCESSION NUMBER: ATCC 15313
atggcaaaagaaaaatttgaccgctctaaaccccatgttaacattggtactattggacacgttgaccatggtaaaacaactttaactgctgcaattacaactgtacttgctaaaaaaggctatgctgatgcacaagcttatgaccaaattgatggtgctccagaagaaagagaacgtggaatcacaatctctactgctcacgttgagtaccaaactgacagccgtcactatgcacacgttgactgcccaggacatgccgattacgttaaaaac

SEQ ID NO: 2263 - DNA, 279 bp, Mycobacterium avium
  ref <308>: DATABASE ACCESSION NUMBER: ATCC 25291
gtggcgaaggcgaagttcgagcggacgaagccgcacgtcaacatcgggaccatcggtcacgttgaccacggcaagaccacgctgaccgcggctatcaccaaggttctgcacgacaagtacccggacctgaacgagtcccgcgcgttcgaccagatcgacaacgcgcccgaggagcgtcagcgcggtatcaccatcaacatctcccacgtggagtaccagaccgacaagcggcactacgctcacgtcgacgccccgggtcacgccgactacatcaagaac

SEQ ID NO: 2264 - DNA, 279 bp, Mycobacterium gordonae
  strain M-Gor-1
gtggcgaaggcgaagttccagcggaccaagccgcacgtcaacatcgggaccatcggtcacgttgaccacggcaagaccactctgaccgcggctatcaccaaggtcctgcacgacaagtacccggacctgaacgagtccaaggcgttcgaccagatcgacaacgcgcctgaggagcgtcagcgcggtatcacgatcaacatcgcgcacgtggaataccagaccgagaagcgtcactacgcgcacgtcgacgcccccggccacgccgactacatcaagaac

SEQ ID NO: 2265 - DNA, 279 bp, Mycobacterium kansasii
  strain Mkan-1
gtggcgaaggcgaagttccagcggaccaagccccacgtcaacatcgggaccatcggtcacgttgaccacggcaagaccaccctgaccgcggctatcaccaaggtcctgcatgacaagttcccggacctgaacgagtcgaaggcgttcgaccagatcgacaacgctcctgaggagcgccagcgcggtatcacgatcaacatcgcgcacgtggagtaccagaccgagaagcggcactatgcacacgtcgacgcgccgggccacgccgactacatcaagaac

SEQ ID NO: 2266 - DNA, 279 bp, Mycobacterium terrae
  strain Mter-1
gtggcgaaggcgaagttcgagcggacgaagccgcacgtcaacatcgggaccatcggtcacgttgaccacggcaagaccacgctgaccgcggctatcaccaaggttctgcacgacaagtacccggacctcaacgagtcgcgtgcgttcgaccagatcgacaacgctcccgaagagcgtcagcgcggtatcaccatcaacatctcccacgtggagtaccagaccgagaagcggcactacgcccacgtcgacgctcctggtcacgctgactacatcaagaac

SEQ ID NO: 2267 - DNA, 273 bp, Neisseria polysaccharea
  ref <308>: DATABASE ACCESSION NUMBER: ATCC 43768
atggctaaggaaaaattcgaacgtagcaaaccgcacgtaaacgttggcaccatcggtcacgttgaccatggtaaaaccactctgactgctgctttgactactattttggctaaaaaattcggcggtgctgcaaaagcttacgaccaaatcgacaacgcacccgaagaaaaagcacgcggtattaccattaacacctcgcacgtagaatacgaaaccgaaacccgccactacgcacacgtagactgcccgggtcacgccgactacgttaaaaac

SEQ ID NO: 2268 - DNA, 273 bp, Staphylococcus epidermidis
  ref <308>: DATABASE ACCESSION NUMBER: ATCC 14990
atggcaaaagaaaaatttgatcgctcaaaagaacatgccaatattggtactatcggtcacgttgaccatggtaaaacaactttaacagctgctatcgcaactgtattagctaaaaatggtgacactgttgcacaatcatacgatatgattgacaacgctccagaagaaaaagaacgtggtattacaatcaatactgcacatatcgaataccaaactgacaaacgtcactatgctcacgttgactgcccaggacacgctgactatgttaaaaac

SEQ ID NO: 2269 - DNA, 273 bp, Staphylococcus haemolyticus
  ref <308>: DATABASE ACCESSION NUMBER: ATCC 29970
atggcaaaagaaaaatttgatcgctcaaaagaacatgccaatattggtactatcggtcacgttgaccatggtaaaactactttaacagctgctatcgcaactgtattagctaaaaatggtgacactgtagcacaatcatatgacatgattgacaacgctccagaagaaaaagaacgtggtatcacaatcaatactgcacacatcgagtatcaaactgacaaacgtcactatgctcacgttgactgcccaggacacgctgactatgttaaaaac

SEQ ID NO: 2270 - DNA, 812 bp, Aeromonas hydrophila
  ref <308>: DATABASE ACCESSION NUMBER: ATCC 7966
cgatcctggtagtagcagcgactgacggcccgatgccgcagactcgtgagcacatcctgctgggtcgtcaggtaggcgttccgtacatcatcgtgttcatgaacaagtgtgacatggtagatgacgaagagctgctggaactggtcgagatggaagttcgcgaactgctgtccgagtacgacttcccgggtgatgacctgccggtagtccgtggttcygcactgaaagcgctggaaggcgaagctcagtgggaagagaagatcctggaactggctggccacctggacacctacattccggagccggagcgtgccatcgacctgccgttcctgatgcctatcgaagacgtattctccatcgctggccgyggtaccgtagtgaccggtcgtgtagagcgcggtatcgtcaaagttggtgaagaagtggaaatcgtkggtatcaaagataccaccaagaccacctgtaccggcgttgaaatgttccgcaaactgctggacgaaggtcgtgcaggcgagaacatcggtgcactgctgcgtggcgtgaagcgtgaagacgtagagcgtggtcaggtactggccaagccgggcaccatcaagccgcacaccaagttygaatctgaagtgtacgtgctgtccaaagaagaaggtggtcgtcataccccgttcttcaaaggctaccgtccgcagttctacttccgtactaccgacgtgaccggtaccatcgaactgccggaaggcgtagagatggtaatgccgggcgacaacatcaagatggttgttaccctgattgcgccgatcgcgatggacgacggc

SEQ ID NO: 2271 - DNA, 799 bp, Bilophila wadsworthia
  ref <308>: DATABASE ACCESSION NUMBER: ATCC 49260
cgacggtcccatgccccagacccgtgagcacatcctgctcgcccgtcaggtcggcgtgcctcacctcgtcgtgttcatgaacaagtgtgacctcgtcgacgaccccgaactgctcgaactcgtcgaaatggaagtccgcgaactgctgagctcctacggctaccccggcgatgaaatcccggttgtccgcggttccgctctgaaggctctggaatccgatagcgctgattcccctgacgcccagtgcgtgctcgaactgctcgccgcttgcgacagctacttcccggatccggtccgcgaaaccgacaagcccttcctgatgcccatcgaagacgtgttctccatctccggccgcggtaccgtggtcaccggtcgtgtggaacgtggcatcatcaaggtcggcgaagaagtcgaaatcgtgggtatccgtcccaccgtgaagacgacctgcaccggcgtcgaaatgttccgcaagctgctcgatcagggccaggccggcgacaacatcggcgctctgctccgcggcacgaagcgtgacgaagtggaacgcggccaggttctcgccgctcccaagagcatcacgccccacaagaagttcaaggctgaagtgtacgttctgtccaaggaagaaggcggccgccataccccgttcttcaccggctatcgtcctcagttctacttccgtaccaccgacatcaccggtatcatcgctcttgaagaaggcgttgaaatggttatgcccggcgataacgctacctttaatgtcgagctcattcaccccatcgccatggaaaagggc

SEQ ID NO: 2272 - DNA, 786 bp, Brevundimonas diminuta
  ref <308>: DATABASE ACCESSION NUMBER: ATCC 11568
gatcctggtgtgctcggccgctgacggcccgatgccgcagacccgcgagcacatcctgctgtcgcgtcaggtcggcgttccggcgctggtggtgttcctgaacaaggtcgacatggtcgacgacgaggarctgctggagctggtcgagatggaagtgcgcgagctgctgagctcgtaccagttcccgggcgacgacatcccggtggtcaagggctcggccctggccgcggtggaggatcgcgacccgcacatcggcgccgagcgcgttctggagctgatggcggcggtcgacagctacatcccgcagccggaacgtccgatcgacatgccgttcctgatgccggtggaagacgtgttctcgatctcgggccgcggcaccgtggtgacgggtcgcgtcgagcgcggcgtcgtcaaggtcggtgaagaagtcgaaatcgtcggcatccgtccggttcagaagacgacctgcacgggcgtcgaaatgttccgcaagctgctggaycagggtcargccggcgacaacgtgggcgtgctgctgcgcggcaccaagcgtgaagacgtcgagcgcggccaggtgctgtgcaagccgggttcgatcaccccgcacaccaagttcgtggctgaagcctacatcctgaacaaggaagaaggcggccgtcacacgccgttcttcacgaactaccgtccgcagttctacttccgcacgacggacgtgaccggcatcgtgcgcctgaaggaaggcgtcgagatgatcatgccgggcgacaacgccgagctggacgtcga

SEQ ID NO: 2273 - DNA, 560 bp, Streptococcus mitis
  strain LSPQ 2583
gctattatggctggattactatccaatacgctatccaagaatcccgtaacgtacctgccgtcaaatcgctggaagcagtcggattagataattcattgaaattcctcaatggccttggtatcaattatcctgagatgcattattctaatgcgatttcaagtaatacaagcgaatctggtaaccaatacggagcaagtagcgaaaaaatggctgccgcttacgctgcctttgctaatggcggtacatattacaaaccgcaatacgtcaaccgagttgtctttagcgacggtacagaaaaagtcttttcaaatggcggatcaaaagccatgaaagagacgacagcctacatgatgacagacatgatgaagaccgttcttcagtctggaactggtaccaatgctgcaatcccaggagtttatcaagcaggtaaaactggtacttccaactatgcagatgatgagctagagaagttgacaaaaccttattacagttctagcattgtcacaccagacgaactatttgttggctatactccacaatactctatggctgtttggaca

SEQ ID NO: 2274 - DNA, 551 bp, Streptococcus mitis
  ref <308>: DATABASE ACCESSION NUMBER: ATCC 49456
gctactttggaaacattactgtccaatatgctcttcaacaatcacgtaatgtcacagccgttgaaactttgaataaggtcggtctagataaggctaaagccttccttaatgggcttggtattgattatccaagcatgcattatgcaaacgccatttcaagtaatacaactgaatccaacaaaaaatacggtgcaagtagtgaaaaaatggctgctgcctacgctgcttttgctaatggtggtatttaccacaagccaatgtacatcaataaaatcgtctttagcgacggtagtgagaaagaattttctgatgccggcacacgagctatgaaagaaactactgcctatatgatgactgaaatgatgaaaacagtcctagtatacggtaccggacgtggagcctacctaccatggcttccacaagcaggtaagacaggtacttctaactatactgacgacgaaattgaaaagtatatcaagaacactggctacgtagccccagatgaaatgtttgtagggtatactcgtaaatatgcaatggctgtttggaca

SEQ ID NO: 2275 - DNA, 560 bp, Streptococcus mitis
  ref <308>: DATABASE ACCESSION NUMBER: ATCC 903
gctattatggctggattactatccaatacgctatccaagaatcccgtaacgtaccagccgtcaaatcgctggaagcagtcggattagataattcattgaagttcctcaatggccttggtattaattaccctgaaatgcattattctaatgcgatttcaagtaatacaagcgaatctggtaaccaatacggagcaagtagcgaaaaaatggctgccgcttacgctgcctttgctaatggcggtacatattacaaaccgcaatacgtcaaccgagttgtctttagcgacggtacagaaaaagtcttttcaaatggcggatcaaaagccatgaaagaaacgacagcctacatgatgacagacatgatgaagaccgttcttcaatctggaactggtaccaatgctgcaattccaggagtctatcaagcaggtaaaaccggcacttccaactatgcagatgatgaactagagaagttgacaaaaccttattacagttctagcattgtcacaccagacgagctgtttgttggctacactccacagtactctatggctgtttggaca

SEQ ID NO: 2276 - DNA, 550 bp, Streptococcus oralis
  ref <308>: DATABASE ACCESSION NUMBER: ATCC 35037
ttattttggaaatatcaccatccaatatgcgctccaacaatcacggaacgttacagccgtagaaaccttgaacaaagtcggtttggatagagccaagaccttcctgaatggaatcggtattgactatccagatatgcactatgccaacgcgatttcaagtaatacgactgagtcaaacaaaaagtacggagcaagtagtgagaaaatggctgctgcttacgctgcttttgctaacggtggtatctaccataaaccaatgtatatcaacaaaatcgtctttagcgatggtagctcaaaagaatacgctgatcctggtactcgtgccatgaaagagacgaccgcctatatgatgacagaaatgatgaagactgtcttggcatacggaacgggtcgtggtgcttatctcccttggctacctcaagctggtaagactggtacatcaaactatacagatgatgaaattgaaaactacatcaaaaatactggttatgtagccccagacgaaatgtttgttggttatactcgcaaatattcaatggctgtwtggaca

SEQ ID NO: 2277 - DNA, 356 bp, Escherichia coli
  ref <308>: DATABASE ACCESSION NUMBER: ATCC 35401
gctcctatctggattatgcgatgtcggtcattgttggccgtgcgctgccagatgtccgagatggcctgaagccggtacaccgtcgcgtactttacgccatgaacgtactaggcaatgactggaacaaagcctataaaaaatctgcccgtgtcgttggtgacgtaatcggtaaataccatccccatggtgactcggcggtctatgacacgatcgtccgcatggcgcagccattctcgctgcgttatatgctggtagacggtcagggtaacttcggttctatcgacggcgactctgcggcggcaatgcgttatacggaaatccgtctggcgaaaattgcccatgaactgatggccgat

SEQ ID NO: 2278 - DNA, 347 bp, Escherichia coli
  ref <308>: DATABASE ACCESSION NUMBER: ATCC 23511
ctcttatctggattatgcgatgtcggtcattgttggccgcgcgctgccggatgtccgagatggcctgaagccggtacaccgtcgcgtactttacgccatgaacgtattgggcaatgactggaacaaagcctacaaaaaatcagcccgtgtcgttggtgacgtgatcggtaaataccacccgcacggcgactccgcggtatatgacaccatcgttcgtatggcccagccgttctcgctgcgctacatgctggtggatggccaggggaacttcggttcaatcgacggcgactccgccgcggcaatgcgttatacggaaatccgtctggcgaaaattgctcacgaactga

SEQ ID NO: 2279 - DNA, 362 bp, Escherichia coli
  ref <308>: DATABASE ACCESSION NUMBER: ATCC 43886
agagctcctatctggattatgcgatgtcggtcattgttggccgtgcgctgccagatgtccgagatggcctgaagccggtacaccgtcgcgtactttacgccatgaacgtactaggcaatgactggaacaaagcctataaaaaatctgcccgtgtcgttggtgacgtaatcggtaaataccatccccatggtgactcggcggtctatgacacgatcgtccgcatggcgcagccattctcgctgcgttatatgctggtagacggtcagggtaacttcggttctatcgacggcgactctgcggcggcaatgcgttatacggaaatccgtctggcgaaaattgcccatgaactgatggccgatctc

SEQ ID NO: 2280 - DNA, 358 bp, Escherichia coli
  ref <308>: DATABASE ACCESSION NUMBER: ATCC 25922
ctcctatctggattatgcgatgtcggtcattgttggccgtgcgctgccagatgtccgagatggcctgaagccggtacaccgtcgcgtactttacgccatgaacgtactaggcaatgactggaacaaagcctataaaaaatctgcccgtgtcgttggtgacgtaatcggtaaataccatccccatggtgactcggcggtttatgacacgatcgtccgtatggcgcagccattctcgctgcgttacatgctggtagacggtcagggtaacttcggttccatcgacggcgactctgcggcggcaatgcgttatacggaaatccgtctggcgaaaattgcccatgaactgatggccgatctc

SEQ ID NO: 2281 - DNA, 30 bp, Artificial Sequence
  Synthetic DNA Sequence
cccccagctgggcggcggtatcgatggggg

SEQ ID NO: 2282 - DNA, 18 bp, Artificial Sequence
  Synthetic DNA Sequence
  modified_base (7): i
agrrgcnmaratgtatga

SEQ ID NO: 2283 - DNA, 22 bp, Artificial Sequence
  Synthetic DNA Sequence
  modified_base (3): i
  modified_base (13): i
atntatgayggknttcagaggc

SEQ ID NO: 2284 - DNA, 21 bp, Artificial Sequence
  Synthetic DNA Sequence
  modified_base (11): i
tctgwgtracnggytckgaga

SEQ ID NO: 2285 - DNA, 19 bp, Artificial Sequence
  Synthetic DNA Sequence
  modified_base (5): i
cmccnccwggtggwgawac

SEQ ID NO: 2286 - DNA, 20 bp, Artificial Sequence
  Synthetic DNA Sequence
agttgctgtattaggaaatg

SEQ ID NO: 2287 - DNA, 20 bp, Artificial Sequence
  Synthetic DNA Sequence
tcgaagttgctgtattagga

SEQ ID NO: 2288 - DNA, 1240 bp, Enterococcus faecium
  strain BM4339
tagaagctggctcgtttttttataaataagttattcgtttatttttgttttgtgctaaaatatgagagtaaatcactgaacgatttagaatacaggaggacaatcttttgaagattactttactatatggcggacgcagcgcagagcagagcatgaagtgtccattctttccgcattttcagttttaaatgccatttattataattattaccaagttcaactcgtatttattacaaaagaaggacaatgggtcaaaggtccattactaacagaaaaacctgccagcaaagatgtcttgcatctttcatgggacccaagtggacagacagaggaaggctttacaggaaaagtgatcaatccgggcgaaatcaaagaagaaggagccatcgtttttccagttttacatgggccaaacggggaagatggaacgatccaaggcttcttagagacattgaatatgccttatgtcggcgcaggcgtattgaccagtgcatgtgccatggataaaatcatgaccaagtatattttacaagctgctggtgtgccgcaagttccttatgtaccagtacttaagaatcaatggaaagaaaatcctaaaaaagtatttgatcaatgtgaaggttctttgctttatccgatgtttgtcaaaccggcgaatatgggttctagtgtcggcattacaaaagcagaaaaccgagaagagctgcaaaatgctttagcaacagcctatcagtatgattctcgagcaatcgttgaacaaggaattgaagcgcgcgaaatcgaagttgctgtattaggaaatgaagacgttcggacgactttgcctggtgaagtcgtaaaagacgtagcattctatgattatgaagcaaaatatatcaataataaaatcgaaatgcagattccagccgaagtgccagaagaagtttatcaaaaagcgcaagagtacgcgaagttagcttacacgatgttaggtggaagcggattgagccggtgcgatttctttttgacaaataaaaatgaattattcctgaatgaattaaactctatgccaggatttacggagttcagtatgtacccactcttatgggaaaatatgggcttgaaatacggtgatttgattgaagaactgatccagttaggaatgaatcgataccatcagcgtcaatctttttttgaaaaaaatgaataaagagaaataaagaagaggctggagtgattgcgtaaccgcgttcattctagc

SEQ ID NO: 2289 - DNA, 20 bp, Artificial Sequence
  Synthetic DNA Sequence
caccgaagaagatgaaaaaa

SEQ ID NO: 2290 - DNA, 18 bp, Artificial Sequence
  Synthetic DNA Sequence
tggcaccgaagaagatga

SEQ ID NO: 2291 - DNA, 19 bp, Artificial Sequence
  Synthetic DNA Sequence
attttggcaccgaagaaga

SEQ ID NO: 2292 - DNA, 19 bp, Artificial Sequence
  Synthetic DNA Sequence
gaatcggcaagacaatatg

SEQ ID NO: 2293 - DNA, 1032 bp, Enterococcus faecium
  strain BM4147
atgaatagaataaaagttgcaatactgtttgggggttgctcagaggagcatgacgtatcggtaaaatctgcaatagagatagccgctaacattaataaagaaaaatacgagccgttatacattggaattacgaaatctggtgtatggaaaatgtgcgaaaaaccttgcgcggaatgggaaaacgacaattgctattcagctgtactctcgccggataaaaaaatgcacggattacttgttaaaaagaaccatgaatatgaaatcaaccatgttgatgtagcattttcagctttgcatggcaagtcaggtgaagatggatccatacaaggtctgtttgaattgtccggtatcccttttgtaggctgcgatattcaaagctcagcaatttgtatggacaaatcgttgacatacatcgttgcgaaaaatgctgggatagctactcccgccttttgggttattaataaagatgataggccggtggcagctacgtttacctatcctgtttttgttaagccggcgcgttcaggctcatccttcggtgtgaaaaaagtcaatagcgcggacgaattggactacgcaattgaatcggcaagacaatatgacagcaaaatcttaattgagcaggctgtttcgggctgtgaggtcggttgtgcggtattgggaaacagtgccgcgttagttgttggcgaggtggaccaaatcaggctgcagtacggaatctttcgtattcatcaggaagtcgagccggaaaaaggctctgaaaacgcagttataaccgttcccgcagacctttcagcagaggagcgaggacggatacaggaaacggcaaaaaaaatatataaagcgctcggctgtagaggtctagcccgtgtggatatgtttttacaagataacggccgcattgtactgaacgaagtcaatactctgcccggtttcacgtcatacagtcgttatccccgtatgatggccgctgcaggtattgcacttcccgaactgattgaccgcttgatcgtattagcgttaaaggggtga

SEQ ID NO: 2294 - DNA, 20 bp, Artificial Sequence
  Synthetic DNA Sequence
aaacgaggatgatttgattg

SEQ ID NO: 2295 - DNA, 18 bp, Artificial Sequence
  Synthetic DNA Sequence
ttgagcaagcgatttcgg

SEQ ID NO: 2296 - DNA, 1029 bp, Enterococcus faecalis; identical to SEQ ID NO: 1713
  strain V583

SEQ ID NO: 2297 - DNA, 17 bp, Artificial Sequence
  Synthetic DNA Sequence
ttcaggagggggatcgc

What is claimed is:

1. A composition for the detection of a microorganisms in a sample using a nucleic acid amplification assay, comprising at least one primer pair, said primer pair comprising forward and reverse oligonucleotides, wherein said oligonucleotides each comprise a binding region that is complementary to primer binding sites present on opposite strands of the microorganism's DNA, wherein said primer pair is adapted to amplify a region of said microorganism's DNA between and including said primer binding sites to produce a detectable amplification product, wherein said binding regions correspond to, or are fully complementary to, at least 12 consecutive nucleotides of at least two of the following nucleotide sequences:
bases 317-339 of E. coli tuf,
bases 470-492 of E. coli tuf,
bases 692-714 of E. coli tuf,
bases 35-60 of B. cereus tuf,
bases 469-496 of B. cereus tuf
bases 317-399 of A. meyeri tuf,
bases 686-711 of A. meyeri tuf,
bases 33-58 of B. distasonis tuf,
bases 473-495 of B. distasonis tuf,
bases 639-663 of B. distasonis tuf,
bases 443-464 of A. fumigatus tuf, and
bases 846-866 of A. fumigatus tuf,
bases 286-306 of C. albicans tuf,
bases 553-575 of C. albicans tuf,
bases 281-301 of A. fumigatus tuf,
bases 488-509 of A. fumigatus tuf,
bases 143-163 of A. fumigatus tuf,
bases 166-188 of L. tropica tuf,
bases 648-668 of L. tropica tuf
bases 274-293 of L. tropica tuf,
bases 676-699 of L. tropica tuf,
bases 389-407 of L. tropica tuf, and
bases 778-799 of L. tropica tuf.

2. The composition of claim 1, wherein said microorganism is a bacterium, and wherein said primer binding sites correspond to, or are fully complementary to, a nucleic acid region selected from the group consisting of:
bases 470-492 of E. coli tuf,
bases 692-714 of E. coli tuf,
bases 317-339 of E. coli tuf,

3. The composition of claim 1, wherein the microorganism is a bacterium, and wherein said primer binding sites correspond to, or are fully complementary to a nucleic acid region selected from the group consisting of:
bases 317-339 of E. coli tuf,
bases 470-492 of E. coli tuf,
bases 692-714 of E. coli tuf,
bases 35-60 of B. cereus tuf,
bases 469-496 of B. cereus tuf
bases 317-399 of A. meyeri tuf,
bases 686-711 of A. meyeri tuf,
bases 33-58 of B. distasonis tuf,
bases 473-495 of B. distasonis tuf, and
bases 639-663 of B. distasonis tuf.

4. The composition of claim 2, wherein the microorganism is a fungus, and wherein said primer binding sites correspond to, or are fully complementary to a nucleic acid region selected from the group consisting of:
bases 443-464 of A. fumigatus tuf,
bases 846-866 of A. fumigatus tuf,
bases 286-306 of C. albicans tuf,
bases 553-575 of C. albicans tuf,
bases 281-301 of A. fumigatus tuf,
bases 488-509 of A. fumigatus tuf, and
bases 143-163 of A. fumigatus tuf.

5. The composition of claim 1, wherein the composition comprises a plurality of primers, and said oligonucleotides comprise the nucleic acid sequences of each of SEQ ID NOs: 636, 637, 638, 639, 643, 644, 645, 646, 647, 648, 649, 650, 651, 1974, 1975, 1976, 1977, 1978, 1979, 1980, 1981, 1982, 1983, 1984, 923, 924, 925, 926, 927, and 928 or the complements thereof.

6. The composition of claim 2, wherein said oligonucleotides comprise the nucleic acid sequences of SEQ ID NOs: 643, 644, and 645.

7. The composition of claim 4, wherein said oligonucleotides comprise the nucleic acid sequences of 1974, 1975, 1976, 1977, 1978, 1979, 1980, 1981, 1982, 1983, and 1984.

8. The composition of claim 1, further comprising at least one internal hybridization probe, wherein said internal hybridization probe can hybridize under stringent conditions to at least one said amplification product.

9. The composition of claim 8, wherein said internal hybridization probe is a molecular beacon.

10. A composition for the detection and identification of a bacterium belonging to the species Streptococcus agalacticae in a sample using a nucleic acid amplification assay, wherein said oligonucleotides each comprise a binding region that is complementary to primer binding sites present on opposite strands of the bacterium's DNA, wherein said primer pair is adapted to amplify a region of said bacterium's DNA between and including said primer binding sites to produce a detectable amplification product, wherein said binding regions correspond to, or are fully complementary to, at least 12 consecutive nucleotides of at least two of the following nucleotide sequences:
bases 309-331 of S. agalacitae tuf,
bases 520-539 of S. agalacitae tuf.

11. The composition of claim 10, wherein said oligonucleotides comprise the nucleic acid of SEQ ID NOs: 549 and 550.

12. The composition of claim 10, further comprising at least one internal hybridization probe, wherein said internal hybridization probe can hybridize under stringent conditions to at least one said amplification product, wherein said hybridization probe comprises or is fully complementary to at least 12 consecutive nucleotides of the nucleic acid of any of SEQ ID NOs: 582 and 583.

13. A composition for detecting the presence of a bacterium belonging to group B streptococci (GBS) in a sample using a nucleic acid amplification assay, wherein said oligonucleotides each comprise a binding region that is complementary to primer binding sites present on opposite strands of GBS DNA, wherein said primer pair is adapted to amplify a region of said GBS's DNA between and including said primer binding sites to produce a detectable amplification product, wherein said binding regions correspond to, or are fully complementary to, at least 12 consecutive nucleotides of at least two of the following nucleotide sequences:
bases 372-394 of S. agalacitae tuf, and
bases 548-568 of S. agalacitae tuf.

14. The composition of claim 13, wherein said oligonucleotides comprise the nucleic acid of SEQ ID NOs: 547 and 548.

15. The composition of claim 13, further comprising at least one internal hybridization probe for detecting at least one said amplification product, wherein said hybridization probe comprises or is fully complementary to at least 12 consecutive nucleotides of any of SEQ ID NOs: 582 and 583.

16. A composition for the detection and identification of a bacterium belonging to the genus Staphylococci in a sample using a nucleic acid amplification assay, wherein said oligonucleotides each comprise a binding region that is complementary to primer binding sites present on opposite strands of the bacterium's DNA, wherein said primer pair is adapted to amplify a region of said bacterium's DNA between and including said primer binding sites to produce a detectable amplification product, wherein said binding regions correspond to, or are fully complementary to, at least 12 consecutive nucleotides of at least two of the following nucleotide sequences:
bases 313-337 of S. aureus tuf, and
bases of 653-667 S. aureus tuf,
further comprising at least one internal hybridization probe for detecting said amplification product, wherein said hybridization probe comprises or is complementary to at least 12 consecutive nucleotides of SEQ ID NOs: 605, 606, 584-601, 605, 606, or 695.

17. The composition of claim 16, wherein said oligonucleotides comprise the nucleic acid sequences of SEQ ID NOs: 1136 and 1137.

18. A composition for the detection and identification of an Entamoeba histolytica parasite in a sample using a nucleic acid amplification assay, wherein said oligonucleotides each comprise a binding region that is complementary to primer binding sites present on opposite strands of the parasite's DNA, wherein said primer pair is adapted to amplify a region of said parasite's DNA between and including said primer binding sites to produce a detectable amplification product, wherein said binding regions correspond to, or are fully complementary to, at least 12 consecutive nucleotides of at least two of the following nucleotide sequences:
bases 38-57 of E. histolytica tuf,
bases 442-461 of E. histolytica tuf,
bases 534-553 of A E. histolytica tuf,
bases 768-787 of E. histolytica tuf, and
bases 149-168 of E. histolytica tuf.

19. The composition of claim 18, wherein said oligonucleotides comprise the nucleic acid sequences of SEQ ID NOs: 703, 704, 705, and 706.

20. A composition for the detection and identification of a Chlamydia trachomatis bacterium in a sample using a nucleic acid amplification assay, wherein said oligonucleotides each comprise a binding region that is complementary to primer binding sites present on opposite strands of the bacterium's DNA, wherein said primer pair is adapted to amplify a region of said bacterium's DNA between and including said primer binding sites to produce a detectable amplification product, wherein said binding regions correspond to, or are fully complementary to, at least 12 consecutive nucleotides of at least two of the following nucleotide sequences:
bases 82-105 of C. trachomatis tuf, and
bases 249-272 of C. trachomatis tuf.

21. The composition of claim 20, wherein said oligonucleotides comprise the nucleic acid sequences of SEQ ID NOs: 554 and 555.

22. A composition for the detection and identification of bacteria belonging to the genus enterococci in a sample using a nucleic acid amplification assay, wherein said oligonucleotides each comprise a binding region that is complementary to primer binding sites present on opposite strands of the bacteria's DNA, wherein said primer pair is adapted to amplify a region of said bacteria's DNA between and including said primer binding sites to produce a detectable amplification product, wherein said binding regions correspond to, or are fully complementary to, at least 12 consecutive nucleotides of at least two of the following nucleotide sequences:
bases 274-295 of E. durans tuf, and
bases 559-579 of E. durans tuf.

23. The composition of claim 22, wherein said oligonucleotides comprise the nucleic acid sequences of SEQ ID NOs: 1136 and 1137.

24. A composition for the detection and identification of E. coli and Shigella bacteria in a sample using a nucleic acid amplification assay, wherein said oligonucleotides each comprise a binding region that is complementary to primer binding sites present on opposite strands of the bacteria's DNA, wherein said primer pair is adapted to amplify a region of said bacteria's DNA between and including said primer binding sites to produce a detectable amplification product, wherein said binding regions correspond to, or are fully complementary to, at least 12 consecutive nucleotides of at least two of the following nucleotide sequences:
bases 283-300 of E. coli tuf, and
bases 484-502 of E. coli tuf.

25. The composition of claim 24, wherein said oligonucleotides comprise the nucleic acid sequences of SEQ ID NOs: 1661 and 1665.
